(19) United States
(12) Patent Application Publication
(10) Pub. No.: US 2026/0167723 A1
(43) Pub. Date: Jun. 18, 2026

(54) TCR TARGETING MOLECULES AND USES THEREOF

(71) Applicant: Marengo Therapeutics, Inc., Cambridge, MA (US)

(72) Inventors: Madan Katragadda, Acton, MA (US); Andrew Bayliffe, London (GB)

(21) Appl. No.: 19/333,088

(22) Filed: Sep. 18, 2025

Related U.S. Application Data
(63) Continuation of application No. PCT/US24/20796, filed on Mar. 20, 2024.
(60) Provisional application No. 63/491,399, filed on Mar. 21, 2023.

(51) Int. Cl. C07K 16/28; A61K 39/00; A61K 45/06; A61P 37/06

(52) U.S. Cl. CPC C07K 16/2809; A61K 45/06; A61P 37/06; C07K 16/2803; A61K 2039/505; C07K 2317/31; C07K 2317/52; C07K 2317/565; C07K 2317/72; C07K 2317/732; C07K 2317/734

(57) ABSTRACT

Disclosed herein, in some aspects, are methods of treating autoimmune diseases or conditions using TCR targeting molecules or cells expressing TCR targeting molecules. TCR targeting molecules can comprise a moiety that binds to a TCR variable beta chain (TCRBV) or a TCR variable alpha chain (TCRAV). TCR targeting molecules can further comprise one, two or all of: (ii) an immune cell engager; (iii) a cytokine inhibitor molecule; (iv) a cytotoxic agent; and/or (v) a death receptor signal enhancer. Additionally, disclosed herein, in some aspects, are nucleic acids encoding the same, and methods of producing the aforesaid molecules.

### CROSS-REFERENCE TO RELATED APPLICATIONS

[0001] This application is a continuation of International Application No. PCT/US2024/020796 filed on Mar. 20, 2024, which claims priority to U.S. Provisional Patent Application No. 63/491,399, filed on Mar. 21, 2023, the entire content of which is incorporated herein by reference.

### REFERENCE TO A SEQUENCE LISTING

[0002] The instant application contains a Sequence Listing which has been submitted electronically in XML format and is hereby incorporated by reference in its entirety. Said XML copy, created on Feb. 19, 2026, is named 53676-763_301_SL.xml and is 2,466,417 bytes in size.

### BACKGROUND

[0003] T cell mediated antigen recognition depends on the interaction of the T cell receptor (TCR) with the antigen-major histocompatibility complex (MHC). The heterodimeric TCRs consist of a combination of α and β chains (αβ TCR) expressed by the majority of T cells, or γδ chains (γδ TCR) present only in about 1-5% of the T cells. A highly diverse TCR repertoire is a fundamental property of an effective immune system. However, the immune repertoire can change greatly with the onset and progression of diseases, such as cancer, autoimmune, inflammatory, and infectious diseases.

[0004] Autoimmunity may result from abnormal regulation of the immune system. This may be manifested by autoreactive TCR clones that attack a patient's own cells. There is a need for improved therapies for autoimmune diseases.

### SUMMARY

[0005] Disclosed herein, in some aspects, is a method of treating a disease or condition or reducing a risk of developing the disease or condition in a subject in need thereof, comprising administering to the subject a therapeutically effective amount of an agent comprising a moiety that binds to a TCR variable region,
[0006] wherein the TCR variable region is a T cell receptor alpha variable region (TCRαV) or a T cell receptor variable beta region (TCRβV), and
[0007] wherein:
   [0008] (a) the disease or condition is multiple sclerosis, and the moiety that binds to the TCR variable region binds to a TCRα V1 subfamily;
   [0009] (b) the disease or condition is Crohn's disease, and the moiety that binds to the TCR variable region binds to a TCRα V2 subfamily;
   [0010] (c) the disease or condition is celiac disease, and the moiety that binds to the TCR variable region binds to a TCRα V4 subfamily;
   [0011] (d) the disease or condition is Type I diabetes, and the moiety that binds to the TCR variable region binds to a TCRα V12 subfamily;
   [0012] (e) the disease or condition is Sjogren's syndrome, and the moiety that binds to the TCR variable region binds to a TCRα V13 subfamily;
   [0013] (f) the disease or condition is celiac disease, and the moiety that binds to the TCR variable region binds to a TCRα V20 subfamily;
   [0014] (g) the disease or condition is ankylosing spondylitis, and the moiety that binds to the TCR variable region binds to a TCRα V21 subfamily;
   [0015] (h) the disease or condition is Crohn's disease, and the moiety that binds to the TCR variable region binds to a TCRα V22 subfamily;
   [0016] (i) the disease or condition is celiac disease, and the moiety that binds to the TCR variable region binds to a TCRα V26 subfamily;
   [0017] (j) the disease or condition is Crohn's disease, and the moiety that binds to the TCR variable region binds to a TCRα V40 subfamily;
   [0018] (k) the disease or condition is joint implant failure, and the moiety that binds to the TCR variable region binds to a TCRα V41 subfamily;
   [0019] (l) the disease or condition is celiac disease, and the moiety that binds to the TCR variable region binds to a TCRβ V4 subfamily;
   [0020] (m) the disease or condition is primary Sjogren's syndrome, and the moiety that binds to the TCR variable region binds to a TCRβ V6 subfamily;
   [0021] (n) the disease or condition is amyotrophic lateral sclerosis, and the moiety that binds to the TCR variable region binds to a TCRβ V7 subfamily;
   [0022] (o) the disease or condition is celiac disease, and the moiety that binds to the TCR variable region binds to a TCRβ V7 subfamily;
   [0023] (p) the disease or condition is multiple sclerosis, and the moiety that binds to the TCR variable region binds to a TCRβ V7 subfamily;
   [0024] (q) the disease or condition is ankylosing spondylitis, and the moiety that binds to the TCR variable region binds to a TCRβ V9 subfamily;
   [0025] (r) the disease or condition is multiple sclerosis, and the moiety that binds to the TCR variable region binds to a TCRβ V10 subfamily;
   [0026] (s) the disease or condition is COVID-induced multisystem inflammatory syndrome in children, and the moiety that binds to the TCR variable region binds to a TCRβ VII subfamily;
   [0027] (t) the disease or condition is Type I diabetes, and the moiety that binds to the TCR variable region binds to a TCRβ V12 subfamily;
   [0028] (u) the disease or condition is multiple sclerosis, and the moiety that binds to the TCR variable region binds to a TCRβ V10 subfamily;
   [0029] (v) the disease or condition is Amyotrophic lateral sclerosis, and the moiety that binds to the TCR variable region binds to a TCRβ V23 subfamily; or
   [0030] (w) the disease or condition is multiple sclerosis, and the moiety that binds to the TCR variable region binds to a TCRβ V29 subfamily.

[0031] In some embodiments, the administration of the therapeutically effective amount of the agent inhibits or prevents activation or expansion of autoreactive T cells in the subject.

[0032] In some embodiments, the autoreactive T cells target an autologous cell in the subject.

[0033] In some embodiments, the autoreactive T cells express TCRαV and/or TCRβV.

[0034] In some embodiments, the agent comprises an antibody molecule or antigen binding domain thereof.

[0035] In some embodiments, the antibody molecule comprises an Fc region.

[0036] In some embodiments, the Fc region comprises a binding mutation.

[0037] In some embodiments, the agent is functionally linked to a cytotoxic agent.

[0038] In some embodiments, the cytotoxic agent comprises calicheamicin, monomethyl auristatin E, maytansine derivative, or exatecan derivative.

[0039] In some embodiments, the Fc region comprises no binding mutation.

[0040] In some embodiments, the cytotoxic agent mediates killing of the autoreactive T cells in the subject.

[0041] In some embodiments, the Fc region has enhanced effector function.

[0042] In some embodiments, the enhanced effector function comprises antibody dependent cell-mediated cytotoxicity (ADCC), antibody-dependent cellular phagocytosis (ADCP) or complement dependent cytotoxicity (CDC).

[0043] In some embodiments, the enhanced effector function mediates killing of the autoreactive T cells in the subject.

[0044] In some embodiments, the agent comprises an another moiety.

[0045] In some embodiments, the another moiety comprises a NK cell engager, a T cell engager, a B cell engager, a dendritic cell engager, or a macrophage cell engager.

[0046] In some embodiments, the another moiety comprises the NK cell engager, and wherein said NK cell engager binds to NKp30.

[0047] In some embodiments, binding of the another moiety to NKp30 mediates killing of the autoreactive T cells in the subject.

[0048] In some embodiments, the another moiety comprises the T cell engager, and wherein said T cell engager binds to an antigen expressed on a CD8+ and/or CD4+ T cell.

[0049] In some embodiments, the another moiety comprises the T cell engager, and wherein said T cell engager binds to a TCRαV or a TCRβV.

[0050] In some embodiments, the TCRαV or the TCRβV comprises a different TCRαV or a TCRβV from the TCR variable region that the moiety of the agent binds to.

[0051] In some embodiments, the another moiety comprises the T cell engager, and wherein said T cell engager binds to CD3.

[0052] In some embodiments, binding of the T cell engager to a CD8+ and/or CD4+ T cell mediates killing of the autoreactive T cells in the subject.

[0053] In some embodiments, the disease or condition is multiple sclerosis, and wherein the moiety that binds to the TCR variable region binds to TCRαV1-1 or TCRαV1-2.

[0054] In some embodiments, the disease or condition is type I diabetes, and wherein the moiety that binds to the TCR variable region binds to TCRαV12-3.

[0055] In some embodiments, the disease or condition is Sjogren's syndrome, and wherein the moiety that binds to the TCR variable region binds to TCRαV13-1 or TCRαV13-2.

[0056] In some embodiments, the disease or condition is celiac disease, and wherein the moiety that binds to the TCR variable region binds to TCRαV26-1 or TCRαV26-2.

[0057] In some embodiments, the disease or condition is primary Sjogren's syndrome, and wherein the moiety that binds to the TCR variable region binds to TCRβV6-1, TCRβV6-2/3, or TCRβV6-5.

[0058] In some embodiments, the disease or condition is amyotrophic lateral sclerosis, and wherein the moiety that binds to the TCR variable region binds to TCRβV7-1 or TCRβV7-8/9.

[0059] In some embodiments, the disease or condition is celiac disease, and wherein the moiety that binds to the TCR variable region binds to TCRβV7-1 or TCRβV7-8/9.

[0060] In some embodiments, the disease or condition is multiple sclerosis, and wherein the moiety that binds to the TCR variable region binds to TCRβV7-1 or TCRβV7-8/9.

[0061] In some embodiments, the disease or condition is multiple sclerosis, and wherein the moiety that binds to the TCR variable region binds to TCRβV10-3.

[0062] In some embodiments, the disease or condition is COVID-induced multisystem inflammatory syndrome, and wherein the moiety that binds to the TCR variable region binds to TCRβV11-2.

[0063] In some embodiments, the subject is a child.

[0064] In some embodiments, the disease or condition is type I diabetes, and wherein the moiety that binds to the TCR variable region binds to TCRβV12-3/4.

[0065] In some embodiments, the disease or condition is multiple sclerosis, and wherein the moiety that binds to the TCR variable region binds to TCRβV20-1.

[0066] In some embodiments, the disease or condition is multiple sclerosis, and wherein the moiety that binds to the TCR variable region binds to TCRβV29-1.

[0067] Disclosed herein, in some aspects, is a composition comprising a recombinant T cell receptor or a chimeric antigen receptor (CAR) comprising a moiety that binds to a TCR variable region.

[0068] Disclosed herein, in some aspects, is a composition comprising a T cell comprising a recombinant T cell receptor or a chimeric antigen receptor (CAR), wherein the recombinant T cell receptor or the CAR comprises a moiety that binds to a TCR variable region.

[0069] In some embodiments, the recombinant T cell receptor or the CAR comprises
[0070] (a) an extracellular domain comprising the moiety that binds to the TCR variable region,
[0071] (b) a transmembrane domain; and
[0072] (c) an intracellular domain comprising a intracellular signaling domain.

[0073] In some embodiments, the extracellular domain comprises a CD8 or CD28 extracellular domain.

[0074] In some embodiments, the transmembrane domain comprises a CD8 or CD28 transmembrane domain.

[0075] In some embodiments, the intracellular domain comprises a CD3 zeta intracellular signaling domain.

[0076] In some embodiments, the moiety that binds to the TCR variable region binds a TCRαV subfamily selected from the group consisting of: a TCRα V1 subfamily, a TCRα V2 subfamily, a TCRα V3 subfamily, a TCRα V4, a TCRα V5 subfamily, a TCRα V6 subfamily, a TCRα V7 subfamily, a TCRα V8 subfamily, a TCRα V9 subfamily, a TCRα V10 subfamily, a TCRα V12 subfamily, a TCRα V13 subfamily, a TCRα V14 subfamily, a TCRα V16 subfamily, a TCRα V17 subfamily, a TCRα V18 subfamily, a TCRα V19 subfamily, a TCRα V20 subfamily, a TCRα V21 subfamily, a TCRα V22 subfamily, a TCRα V23 subfamily, a TCRα V24 subfamily, TCRα V25 subfamily, a TCRα V26 subfamily, a TCRα V27 subfamily, a TCRα V29 subfamily, a TCRα V30 subfamily, a TCRα V34 subfamily, a TCRα V35 subfamily, a TCRα V36 subfamily, a TCRα V38 subfamily, a TCRα V39 subfamily, a TCRα V40 subfamily, and a TCRα V41 subfamily, as well as family members of said subfamilies, and variants thereof.

[0077] In some embodiments, the moiety that binds to the TCR variable region binds to a TCRβV subfamily selected from the group consisting of: a TCRβ V2 subfamily, a TCRβ V3 subfamily, a TCRβ V4 subfamily, a TCRβ V5 subfamily, a TCRβ V6 subfamily, a TCRβ V9 subfamily, a TCRβ V10 subfamily, a TCRβ V11 subfamily, a TCRβ V12 subfamily, a TCRβ V13 subfamily, a TCRβ V16 subfamily, a TCRβ V19 subfamily, a TCRβ V21 subfamily, a TCRβ V23 subfamily, a TCRβ V27 subfamily, a TCRβ V28 subfamily, TCRβ V29 subfamily, and TCRβ V30 subfamily, as well as family members of said subfamilies, and variants thereof.

[0078] In another aspect, provided herein is a pharmaceutical composition comprising a composition disclosed herein, and a pharmaceutically acceptable diluent, carrier, excipient, or stabilizer.

[0079] In another aspect, provided herein is a method of treating a disease or condition, or reducing a risk of developing the disease or condition in a subject in need thereof comprising administering a therapeutically effective amount of a pharmaceutical composition disclosed herein to the subject.

[0080] In some embodiments, the disease or condition is an autoimmune disease.

[0081] In some embodiments, the autoimmune disease is selected from the group consisting of amyotrophic lateral sclerosis (ALS), coeliac disease (CD), ankylosing spondylitis (AS), Covid-induced multisystem inflammatory syndrome in children (MIS-C), primary Sjogren's syndrome (PSS), Churg-Strauss syndrome, sarcoidosis, systemic lupus erythematosus (SLE), type 1 diabetes, autoimmune hepatitis (e.g., type 1 or type 2), primary sclerosing cholangitis, primary biliary cirrhosis, multiple sclerosis, Guillain-Barre syndrome and the AMAN (axonal & neuronal neuropathy), chronic inflammatory demyelinating polyneuropathy (CIDP), transverse myelitis, Tolosa-Hunt syndrome (THS), Devic's disease (neuromyelitis optica), paraneoplastic cerebellardegeneration (PCD), Lambert-Eaton syndrome, psoriasis, scleroderma, CREST (calcinosis,Raynaud phenomenon, esophageal dysmotility, sclerodactyly, and telangiectasia) syndrome,dermatitis herpetiformis, dermatomyositis, bullous pemphigoid, cicatricial pemphigoid/benignmucosal pemphigoid, pemphigoid gestationis, rheumatoid arthritis (RA), psoriatic arthritis, relapsing polychondritis, chronic recurrent multifocal osteomyelitis (CRMO), vasculitis, Kawasaki disease, granulomatosis with polyangiitis (GPA), Behcet's disease (vasculitis),Takayasu's arteritis, polyarteritis nodosa, microscopic polyangiitis (MPA), leukocytoclasticvasculitis, Cogan's syndrome, uveitis, peripheral uveitis (Pars planitis), scleritis, autoimmuneinner ear disease (AIED), Crohn's, ulcerative colitis (UC), Dressler's syndrome, Rheumaticfever, Evans syndrome, paroxysmal nocturnal hemoglobinuria (PNH), hemolytic anemia, thrombocytopenic purpura (TTP), polymyositis, juvenile myositis (JM), including Juvenile Dermatomyositis (JDM) and Juvenile Polymyositis (JPM), ocular cicatricial pemphigoid, or Hashimoto's thyroiditis.

[0082] In some embodiments:
[0083] (a) the disease or condition is multiple sclerosis, and the moiety that binds to the TCR variable region binds to a TCRα V1 subfamily;
[0084] (b) the disease or condition is Crohn's disease, and the moiety that binds to the TCR variable region binds to a TCRα V2 subfamily;
[0085] (c) the disease or condition is celiac disease, and the moiety that binds to the TCR variable region binds to a TCRα V4 subfamily;
[0086] (d) the disease or condition is Type I diabetes, and the moiety that binds to the TCR variable region binds to a TCRα V12 subfamily;
[0087] (e) the disease or condition is Sjogren's syndrome, and the moiety that binds to the TCR variable region binds to a TCRα V13 subfamily;
[0088] (f) the disease or condition is celiac disease, and the moiety that binds to the TCR variable region binds to a TCRα V20 subfamily;
[0089] (g) the disease or condition is ankylosing spondylitis, and the moiety that binds to the TCR variable region binds to a TCRα V21 subfamily;
[0090] (h) the disease or condition is Crohn's disease, and the moiety that binds to the TCR variable region binds to a TCRα V22 subfamily;
[0091] (i) the disease or condition is celiac disease, and the moiety that binds to the TCR variable region binds to a TCRα V26 subfamily;
[0092] (j) the disease or condition is Crohn's disease, and the moiety that binds to the TCR variable region binds to a TCRα V40 subfamily;
[0093] (k) the disease or condition is joint implant failure, and the moiety that binds to the TCR variable region binds to a TCRα V41 subfamily;
[0094] (1) the disease or condition is celiac disease, and the moiety that binds to the TCR variable region binds to a TCRβ V4 subfamily;
[0095] (m) the disease or condition is primary Sjogren's syndrome, and the moiety that binds to the TCR variable region binds to a TCRβ V6 subfamily;
[0096] (n) the disease or condition is amyotrophic lateral sclerosis, and the moiety that binds to the TCR variable region binds to a TCRβ V7 subfamily;
[0097] (o) the disease or condition is celiac disease, and the moiety that binds to the TCR variable region binds to a TCRβ V7 subfamily;
[0098] (p) the disease or condition is multiple sclerosis, and the moiety that binds to the TCR variable region binds to a TCRβ V7 subfamily;
[0099] (q) the disease or condition is ankylosing spondylitis, and the moiety that binds to the TCR variable region binds to a TCRβ V9 subfamily;
[0100] (r) the disease or condition is multiple sclerosis, and the moiety that binds to the TCR variable region binds to a TCRβ V10 subfamily;
[0101] (s) the disease or condition is COVID-induced multisystem inflammatory syndrome in children, and the moiety that binds to the TCR variable region binds to a TCRβ VII subfamily;
[0102] (t) the disease or condition is Type I diabetes, and the moiety that binds to the TCR variable region binds to a TCRβ V12 subfamily;
[0103] (u) the disease or condition is multiple sclerosis, and the moiety that binds to the TCR variable region binds to a TCRβ V10 subfamily;
[0104] (v) the disease or condition is Amyotrophic lateral sclerosis, and the moiety that binds to the TCR variable region binds to a TCRβ V23 subfamily; or
[0105] (w) the disease or condition is multiple sclerosis, and the moiety that binds to the TCR variable region binds to a TCRβ V29 subfamily.

[0106] In some embodiments, the disease or condition is multiple sclerosis, and wherein the moiety that binds to the TCR variable region binds to TCRαV1-1 or TCRαV1-2.

[0107] In some embodiments, the disease or condition is type I diabetes, and wherein the moiety that binds to the TCR variable region binds to TCRαV12-3.

[0108] In some embodiments, the disease or condition is Sjogren's syndrome, and wherein the moiety that binds to the TCR variable region binds to TCRαV13-1 or TCRαV13-2.

[0109] In some embodiments, the disease or condition is celiac disease, and wherein the moiety that binds to the TCR variable region binds to TCRαV26-1 or TCRαV26-2.

[0110] In some embodiments, the disease or condition is primary Sjogren's syndrome, and wherein the moiety that binds to the TCR variable region binds to TCRβV6-1, TCRβV6-2/3, or TCRβV6-5.

[0111] In some embodiments, the disease or condition is amyotrophic lateral sclerosis, and wherein the moiety that binds to the TCR variable region binds to TCRβV7-1 or TCRβV7-8/9.

[0112] In some embodiments, the disease or condition is celiac disease, and wherein the moiety that binds to the TCR variable region binds to TCRβV7-1 or TCRβV7-8/9.

[0113] In some embodiments, the disease or condition is multiple sclerosis, and wherein the moiety that binds to the TCR variable region binds to TCRβV7-1 or TCRβV7-8/9.

[0114] In some embodiments, the disease or condition is multiple sclerosis, and wherein the moiety that binds to the TCR variable region binds to TCRβV10-3.

[0115] In some embodiments, the disease or condition is COVID-induced multisystem inflammatory syndrome, and wherein the moiety that binds to the TCR variable region binds to TCRβV11-2.

[0116] In some embodiments, the subject is a child.

[0117] In some embodiments, the disease or condition is type I diabetes, and wherein the moiety that binds to the TCR variable region binds to TCRβV12-3/4.

[0118] In some embodiments, the disease or condition is multiple sclerosis, and wherein the moiety that binds to the TCR variable region binds to TCRβV20-1.

[0119] In some embodiments, the disease or condition is multiple sclerosis, and wherein the moiety that binds to the TCR variable region binds to TCRβV29-1.

[0120] In some embodiments, the methods provided herein further comprise administering a second therapeutic agent or therapy to the subject.

[0121] In some embodiments, the second therapeutic agent or therapy comprises a chemotherapeutic agent, a biologic agent, an immunosuppressive agent, or radiation.

[0122] In some embodiments, the second therapeutic agent or therapy is administered in combination with an agent provided herein, a composition provided herein or a pharmaceutical composition provided herein, sequentially, simultaneously, or concurrently.

[0123] In some aspects, provided herein is a method of inhibiting or preventing activation and/or expansion of autoreactive T cells in a subject in need thereof, the method comprising administering to the subject a therapeutically effective amount of an agent comprising a moiety that binds to a TCR variable region, thereby inhibiting or preventing the activation and/or expansion of the autoreactive T cells in the subject, wherein the TCR variable region is a T cell receptor alpha variable region (TCRαV) or a T cell receptor variable beta region (TCRβV), wherein the autoreactive T cells target an autologous cell in the subject, wherein the autoreactive T cells express TCRαV and/or TCRβV, and wherein: (a) the subject suffers from multiple sclerosis, and the moiety that binds to the TCR variable region binds to a TCR variable region in TCRα V1 subfamily; (b) the subject suffers from Crohn's disease, and the moiety that binds to the TCR variable region binds to a TCR variable region in TCRα V2 subfamily; (c) the subject suffers from celiac disease, and the moiety that binds to the TCR variable region binds to a TCR variable region in TCRα V4 subfamily; (d) the subject suffers from Type I diabetes, and the moiety that binds to the TCR variable region binds to a TCR variable region in TCRα V12 subfamily; (e) the subject suffers from Sjögren's syndrome, and the moiety that binds to the TCR variable region binds to a TCR variable region in TCRα V13 subfamily; (f) the subject suffers from celiac disease, and the moiety that binds to the TCR variable region binds to a TCR variable region in TCRα V20 subfamily; (g) the subject suffers from ankylosing spondylitis, and the moiety that binds to the TCR variable region binds to a TCR variable region in TCRα V21 subfamily; (h) the subject suffers from Crohn's disease, and the moiety that binds to the TCR variable region binds to a TCR variable region in TCRα V22 subfamily; (i) the subject suffers from celiac disease, and the moiety that binds to the TCR variable region binds to a TCR variable region in TCRα V26 subfamily; (j) the subject suffers from Crohn's disease, and the moiety that binds to the TCR variable region binds to a TCR variable region in TCRα V40 subfamily; (k) the subject suffers from joint implant failure, and the moiety that binds to the TCR variable region binds to a TCR variable region in TCRα V41 subfamily; (1) the subject suffers from celiac disease, and the moiety that binds to the TCR variable region binds to a TCR variable region in TCRβ V4 subfamily; (m) the subject suffers from primary Sjogren's syndrome, and the moiety that binds to the TCR variable region binds to a TCR variable region in TCRβ V6 subfamily; (n) the subject suffers from amyotrophic lateral sclerosis, and the moiety that binds to the TCR variable region binds to a TCR variable region in TCRβ V7 subfamily; (o) the subject suffers from celiac disease, and the moiety that binds to the TCR variable region binds to a TCR variable region in TCRβ V7 subfamily; (p) the subject suffers from multiple sclerosis, and the moiety that binds to the TCR variable region binds to a TCR variable region in TCRβ V7 subfamily; (q) the subject suffers from ankylosing spondylitis, and the moiety that binds to the TCR variable region binds to a TCR variable region in TCRβ V9 subfamily; (r) the subject suffers from multiple sclerosis, and the moiety that binds to the TCR variable region binds to a TCR variable region in TCRβ V10 subfamily; (s) the subject suffers from COVID-induced multisystem inflammatory syndrome in children, and the moiety that binds to the TCR variable region binds to a TCR variable region in TCRβ VII subfamily; (t) the subject suffers from Type I diabetes, and the moiety that binds to the TCR variable region binds to a TCR variable region in TCRβ V12 subfamily; (u) the subject suffers from multiple sclerosis, and the moiety that binds to the TCR variable region binds to a TCR variable region in TCRβ V10 subfamily; (v) the subject suffers from Amyotrophic lateral sclerosis, and the moiety that binds to the TCR variable region binds to a TCR variable region in TCRβ V23 subfamily; or (w) the subject suffers from multiple sclerosis, and the moiety that binds to the TCR variable region binds to a TCR variable region in TCRβ V29 subfamily.

[0124] In some aspects, provided herein is a method of reducing or depleting autoreactive T cells in a subject in need thereof, the method comprising administering to the subject a therapeutically effective amount of an agent comprising a moiety that binds to a TCR variable region, thereby inhibiting or preventing the activation and/or expansion of autoreactive T cells in the subject, wherein the TCR variable region is a T cell receptor alpha variable region (TCRαV) or a T cell receptor variable beta region (TCRβV), wherein the autoreactive T cells target an autologous cell in the subject, wherein the autoreactive T cells express TCRαV and/or TCRβV, and wherein: (a) the subject suffers from multiple sclerosis, and the moiety that binds to the TCR variable region binds to a TCR variable region in TCRα V1 subfamily; (b) the subject suffers from Crohn's disease, and the moiety that binds to the TCR variable region binds to a TCR variable region in TCRα V2 subfamily; (c) the subject suffers from celiac disease, and the moiety that binds to the TCR variable region binds to a TCR variable region in TCRα V4 subfamily; (d) the subject suffers from Type I diabetes, and the moiety that binds to the TCR variable region binds to a TCR variable region in TCRα V12 subfamily; (e) the subject suffers from Sjögren's syndrome, and the moiety that binds to the TCR variable region binds to a TCR variable region in TCRα V13 subfamily; (f) the subject suffers from celiac disease, and the moiety that binds to the TCR variable region binds to a TCR variable region in TCRα V20 subfamily; (g) the subject suffers from ankylosing spondylitis, and the moiety that binds to the TCR variable region binds to a TCR variable region in TCRα V21 subfamily; (h) the subject suffers from Crohn's disease, and the moiety that binds to the TCR variable region binds to a TCR variable region in TCRα V22 subfamily; (i) the subject suffers from celiac disease, and the moiety that binds to the TCR variable region binds to a TCR variable region in TCRα V26 subfamily; j) the subject suffers from Crohn's disease, and the moiety that binds to the TCR variable region binds to a TCR variable region in TCRα V40 subfamily; (k) the subject suffers from joint implant failure, and the moiety that binds to the TCR variable region binds to a TCR variable region in TCRα V41 subfamily; (1) the subject suffers from celiac disease, and the moiety that binds to the TCR variable region binds to a TCR variable region in TCRβ V4 subfamily; (m) the subject suffers from primary Sjogren's syndrome, and the moiety that binds to the TCR variable region binds to a TCR variable region in TCRβ V6 subfamily; (n) the subject suffers from amyotrophic lateral sclerosis, and the moiety that binds to the TCR variable region binds to a TCR variable region in TCRβ V7 subfamily; (o) the subject suffers from celiac disease, and the moiety that binds to the TCR variable region binds to a TCR variable region in TCRβ V7 subfamily; (p) the subject suffers from multiple sclerosis, and the moiety that binds to the TCR variable region binds to a TCR variable region in TCRβ V7 subfamily; (q) the subject suffers from ankylosing spondylitis, and the moiety that binds to the TCR variable region binds to a TCR variable region in TCRβ V9 subfamily; (r) the subject suffers from multiple sclerosis, and the moiety that binds to the TCR variable region binds to a TCR variable region in TCRβ V10 subfamily; (s) the subject suffers from COVID-induced multisystem inflammatory syndrome in children, and the moiety that binds to the TCR variable region binds to a TCR variable region in TCRβ VII subfamily; (t) the subject suffers from Type I diabetes, and the moiety that binds to the TCR variable region binds to a TCR variable region in TCRβ V12 subfamily; (u) the subject suffers from multiple sclerosis, and the moiety that binds to the TCR variable region binds to a TCR variable region in TCRβ V10 subfamily; (v) the subject suffers from Amyotrophic lateral sclerosis, and the moiety that binds to the TCR variable region binds to a TCR variable region in TCRβ V23 subfamily; or (w) the subject suffers from multiple sclerosis, and the moiety that binds to the TCR variable region binds to a TCR variable region in TCRβ V29 subfamily.

[0125] In some embodiments, the method further comprises determining that the subject suffers from multiple sclerosis that is associated with a biased TCR clonotype that comprises the TCR variable region in TCRα V1 subfamily, TCRβ V7 subfamily, TCRβ V10 subfamily, TCRβ V20 subfamily or TCRβ V29 subfamily, and wherein the moiety that binds to the TCR variable region binds to the TCR variable domain in TCRα V1 subfamily, TCRβ V7 subfamily, TCRβ V10 subfamily, TCRβ V20 subfamily or TCRβ V29 subfamily.

[0126] In some embodiments, the method further comprises determining that the subject suffers from amyotrophic lateral sclerosis that is associated with a biased TCR clonotype that comprises the TCR variable region in TCRβ V7 subfamily or TCRβ V23 subfamily, and wherein the moiety that binds to the TCR variable region binds to the TCR variable domain in TCRβ V7 subfamily or TCRβ V23 subfamily.

[0127] In some embodiments, the method further comprises determining that the subject suffers from celiac disease that is associated with a biased TCR clonotype that comprises the TCR variable region in TCRα V26 subfamily, TCRα V4 subfamily, TCRβ V7 subfamily, or TCRβ V4 subfamily, and wherein the moiety that binds to the TCR variable region binds to the TCR variable domain in TCRα V26 subfamily, TCRα V4 subfamily, TCRβ V7 subfamily, or TCRβ V4 subfamily.

[0128] In some embodiments, the method further comprises determining that the subject suffers from ankylosing spondylitis that is associated with a biased TCR clonotype that comprises the TCR variable region in TCRα V21 subfamily or TCRβ V9 subfamily, and wherein the moiety that binds to the TCR variable region binds to the TCR variable domain in TCRα V21 subfamily or TCRβ V9 subfamily.

[0129] In some embodiments, the method further comprises determining that the subject suffers from COVID-induced multisystem inflammatory syndrome in children that is associated with a biased TCR clonotype that comprises the TCR variable region in TCRβ VII subfamily, and wherein the moiety that binds to the TCR variable region binds to the TCR variable domain in TCRβ VII subfamily.

[0130] In some embodiments, the method further comprises determining that the subject suffers from primary Sjogren's syndrome that is associated with a biased TCR clonotype that comprises the TCR variable region in TCRβ V6 subfamily, and wherein the moiety that binds to the TCR variable region binds to the TCR variable domain in TCRβ V6 subfamily.

[0131] In some embodiments, the method further comprises determining that the subject suffers from Type I diabetes that is associated with a biased TCR clonotype that comprises the TCR variable region in TCRα V12 subfamily or TCRβ V12 subfamily, and wherein the moiety that binds to the TCR variable region binds to the TCR variable domain in TCRα V12 subfamily or TCRβ V12 subfamily.

[0132] In some embodiments, the agent comprises an antibody molecule or antigen binding fragment thereof. In some embodiments, the antibody molecule comprises an Fc region.

[0133] In some embodiments, the Fc region comprises a binding mutation. In some embodiments, the agent is functionally linked to a cytotoxic agent. In some embodiments, the cytotoxic agent comprises calicheamicin, monomethyl auristatin E, maytansine derivative, or exatecan derivative.

[0134] In some embodiments, the Fc region comprises no mutation that affects binding of the Fc region to a Fc receptor. In some embodiments, the cytotoxic agent mediates killing of the autoreactive T cells in the subject. In some embodiments, the Fc region comprises an amino acid mutation that enhances an effector function. In some embodiments, the effector function comprises antibody dependent cell-mediated cytotoxicity (ADCC), antibody-dependent cellular phagocytosis (ADCP) or complement dependent cytotoxicity (CDC). In some embodiments, the effector function mediates killing of the autoreactive T cells in the subject.

[0135] In some embodiments, the agent comprises an another moiety. In some embodiments, the another moiety comprises a NK cell engager, a T cell engager, a B cell engager, a dendritic cell engager, or a macrophage cell engager. In some embodiments, the another moiety comprises the NK cell engager, and wherein the NK cell engager binds to an antigen selected from the group consisting of NKp30, NKp40, NKp44, NKp46, NKG2D, DNAM1, DAP10, CD16, CRTAM, CD27, PSGL1, CD96, CD100 (SEMA4D), NKp80, CD244 (also known as SLAMF4 or 2B4), SLAMF6, SLAMF7, KIR2DS2, KIR2DS4, KIR3DS1, KIR2DS3, KIR2DS5, KIR2DS1, CD94, NKG2C, NKG2E, and CD160. In some embodiments, binding of the another moiety to NKp30 activates an NK cell and mediates killing of the autoreactive T cells in the subject. In some embodiments, the another moiety comprises the NK cell engager, and wherein the NK cell engager binds to a KIR receptor and/or CD94-NKG2A. In some embodiments, binding of the another moiety to the KIR receptor and/or CD94-NKG2A disinhibits an NK cell and mediates killing of the autoreactive T cells in the subject.

[0136] In some embodiments, the another moiety comprises the T cell engager, and wherein the T cell engager binds to an antigen expressed on a CD8+ and/or CD4+ T cell. In some embodiments, the another moiety comprises the T cell engager, and wherein the T cell engager binds to a TCRαV or a TCRβV. In some embodiments, the TCRαV or the TCRβV that the T cell engager binds to is different from the TCR variable region that the moiety of the agent binds to. In some embodiments, the another moiety that binds to the TCRαV or a TCRβV binds a TCRαV in a subfamily selected from the group consisting of: TCRα V1 subfamily, TCRα V2 subfamily, TCRα V3 subfamily, TCRα V4, TCRα V5 subfamily, TCRα V6 subfamily, TCRα V7 subfamily, TCRα V8 subfamily, TCRα V9 subfamily, TCRα V10 subfamily, TCRα V12 subfamily, TCRα V13 subfamily, TCRα V14 subfamily, TCRα V16 subfamily, TCRα V17 subfamily, TCRα V18 subfamily, TCRα V19 subfamily, TCRα V20 subfamily, TCRα V21 subfamily, TCRα V22 subfamily, TCRα V23 subfamily, TCRα V24 subfamily, TCRα V25 subfamily, TCRα V26 subfamily, TCRα V27 subfamily, TCRα V29 subfamily, TCRα V30 subfamily, TCRα V34 subfamily, TCRα V35 subfamily, TCRα V36 subfamily, TCRα V38 subfamily, TCRα V39 subfamily, TCRα V40 subfamily, and TCRα V41 subfamily, as well as family members of the subfamilies, and variants thereof.

[0137] In some embodiments, the another moiety that binds to the TCRαV or the TCRβV binds to a TCRβV in a subfamily selected from the group consisting of: TCRβ V2 subfamily, TCRβ V3 subfamily, TCRβ V4 subfamily, TCRβ V5 subfamily, TCRβ V6 subfamily, TCRβ V9 subfamily, TCRβ V10 subfamily, TCRβ V11 subfamily, TCRβ V12 subfamily, TCRβ V13 subfamily, TCRβ V16 subfamily, TCRβ V19 subfamily, TCRβ V21 subfamily, TCRβ V23 subfamily, TCRβ V27 subfamily, TCRβ V28 subfamily, TCRβ V29 subfamily, and TCRβ V30 subfamily, as well as family members of the subfamilies, and variants thereof.

[0138] In some embodiments, the another moiety comprises the T cell engager, and wherein the T cell engager binds to CD3.

[0139] In some embodiments, binding of the T cell engager to the CD8+ and/or CD4+ T cell mediates killing of the autoreactive T cells in the subject.

[0140] In some embodiments, the subject suffers from multiple sclerosis, and wherein the moiety that binds to the TCR variable region binds to the TCR variable region in TCRαV1-1 or TCRαV1-2 family. In some embodiments, the subject suffers from type I diabetes, and wherein the moiety that binds to the TCR variable region binds to the TCR variable region in TCRαV12-3 family. In some embodiments, the subject suffers from Sjogren's syndrome, and wherein the moiety that binds to the TCR variable region binds to the TCR variable region in TCRαV13-1 or TCRαV13-2 family. In some embodiments, the subject suffers from celiac disease, and wherein the moiety that binds to the TCR variable region binds to the TCR variable region in TCRαV26-1 or TCRαV26-2 family. In some embodiments, the subject suffers from primary Sjogren's syndrome, and wherein the moiety that binds to the TCR variable region binds to the TCR variable region in TCRβV6-1, TCRβV6-2/3, or TCRβV6-5 family. In some embodiments, the subject suffers from amyotrophic lateral sclerosis, and wherein the moiety that binds to the TCR variable region binds to the TCR variable region in TCRβV7-1 or TCRβV7-8/9 family. In some embodiments, the subject suffers from celiac disease, and wherein the moiety that binds to the TCR variable region binds to the TCR variable region in TCRβV7-1 or TCRβV7-8/9 family. In some embodiments, the subject suffers from multiple sclerosis, and wherein the moiety that binds to the TCR variable region binds to the TCR variable region in TCRβV7-1 or TCRβV7-8/9 family. In some embodiments, the subject suffers from multiple sclerosis, and wherein the moiety that binds to the TCR variable region binds to the TCR variable region in TCRβV10-3 family. In some embodiments, the subject suffers from COVID-induced multisystem inflammatory syndrome, and wherein the moiety that binds to the TCR variable region binds to the TCR variable region in TCRβV11-2 family. In some embodiments, the subject is a child. In some embodiments, the subject suffers from type I diabetes, and wherein the moiety that binds to the TCR variable region binds to the TCR variable region in TCRβV12-3/4 family. In some embodiments, the subject suffers from multiple sclerosis, and wherein the moiety that binds to the TCR variable region binds to the TCR variable region in TCRβV20-1 family. In some embodiments, the subject suffers from multiple sclerosis, and wherein the moiety that binds to the TCR variable region binds to the TCR variable region in TCRβV29-1 family.

[0141] In some aspects, provided herein is a method of inhibiting or preventing activation and/or expansion of autoreactive T cells in a subject in need thereof, the method comprising administering to the subject a therapeutically effective amount of an agent comprising a moiety that binds to a TCR variable region, thereby inhibiting or preventing the activation and/or expansion of the autoreactive T cells in the subject, wherein the TCR variable region is a T cell receptor alpha variable region (TCRαV) or a T cell receptor beta variable region (TCRβV), wherein the autoreactive T cells target an autologous cell in the subject, wherein the autoreactive T cells express TCRαV and/or TCRβV, wherein: (a) the subject is identified as having multiple sclerosis or a symptom of multiple sclerosis that is associated with a biased TCR clonotype that comprises the TCR variable region in a TCRα V1 subfamily, and wherein the moiety that binds to the TCR variable region binds to the TCR variable region in the TCRα V1 subfamily, (b) the subject is identified as having multiple sclerosis or a symptom of multiple sclerosis that is associated with a biased TCR clonotype that comprises the TCR variable region in a TCRβ V7 subfamily, and wherein the moiety that binds to the TCR variable region binds to the TCR variable region in the TCRβ V7 subfamily, (c) the subject is identified as having multiple sclerosis or a symptom of multiple sclerosis that is associated with a biased TCR clonotype that comprises the TCR variable region in a TCRβ V10 subfamily, and wherein the moiety that binds to the TCR variable region binds to the TCR variable region in the TCRβ V10 subfamily, (d) the subject is identified as having multiple sclerosis or a symptom of multiple sclerosis that is associated with a biased TCR clonotype that comprises the TCR variable region in a TCRβ V20 subfamily, and wherein the moiety that binds to the TCR variable region binds to the TCR variable region in the TCRβ V20 subfamily, or (e) the subject is identified as having multiple sclerosis or a symptom of multiple sclerosis that is associated with a biased TCR clonotype that comprises the TCR variable region in a TCRβ V29 subfamily, and wherein the moiety that binds to the TCR variable region binds to the TCR variable region in the TCRβ V29 subfamily, and wherein the moiety does not bind to a different TCRαV and/or TCRβV subfamily.

[0142] In some aspects, provided herein is a method of reducing or depleting autoreactive T cells in a subject in need thereof, the method comprising administering to the subject a therapeutically effective amount of an agent comprising a moiety that binds to a TCR variable region, thereby inhibiting or preventing the activation and/or expansion of autoreactive T cells in the subject, wherein the TCR variable region is a T cell receptor alpha variable region (TCRαV) or a T cell receptor variable beta region (TCRβV), wherein the autoreactive T cells target an autologous cell in the subject, wherein the autoreactive T cells express TCRαV and/or TCRβV, and wherein: (a) the subject is identified as having multiple sclerosis or a symptom of multiple sclerosis that is associated with a biased TCR clonotype that comprises the TCR variable region in a TCRα V1 subfamily, and wherein the moiety that binds to the TCR variable region binds to the TCR variable region in the TCRα V1 subfamily, (b) the subject is identified as having multiple sclerosis or a symptom of multiple sclerosis that is associated with a biased TCR clonotype that comprises the TCR variable region in a TCRβ V7 subfamily, and wherein the moiety that binds to the TCR variable region binds to the TCR variable region in the TCRβ V7 subfamily, (c) the subject is identified as having multiple sclerosis or a symptom of multiple sclerosis that is associated with a biased TCR clonotype that comprises the TCR variable region in a TCRβ V10 subfamily, and wherein the moiety that binds to the TCR variable region binds to the TCR variable region in the TCRβ V10 subfamily, (d) the subject is identified as having multiple sclerosis or a symptom of multiple sclerosis that is associated with a biased TCR clonotype that comprises the TCR variable region in a TCRβ V20 subfamily, and wherein the moiety that binds to the TCR variable region binds to the TCR variable region in the TCRβ V20 subfamily, or (e) the subject is identified as having multiple sclerosis or a symptom of multiple sclerosis that is associated with a biased TCR clonotype that comprises the TCR variable region in a TCRβ V29 subfamily, and wherein the moiety that binds to the TCR variable region binds to the TCR variable region in the TCRβ V29 subfamily, and wherein the moiety does not bind to a different TCRαV and/or TCRβV subfamily.

[0143] In some aspects, provided herein is a method of inhibiting or preventing activation and/or expansion of autoreactive T cells in a subject in need thereof, the method comprising administering to the subject a therapeutically effective amount of an agent comprising a moiety that binds to a TCR variable region, thereby inhibiting or preventing the activation and/or expansion of the autoreactive T cells in the subject, wherein the TCR variable region is a T cell receptor alpha variable region (TCRαV) or a T cell receptor beta variable region (TCRβV), wherein the autoreactive T cells target an autologous cell in the subject, wherein the autoreactive T cells express TCRαV and/or TCRβV, wherein: (a) the subject is identified as having amyotrophic lateral sclerosis or a symptom of amyotrophic lateral sclerosis that is associated with a biased TCR clonotype that comprises the TCR variable region in TCRβ V7 subfamily or TCRβ V23 subfamily, and wherein the moiety that binds to the TCR variable region binds to the TCR variable domain in TCRβ V7 subfamily or TCRβ V23 subfamily, or (b) the subject is identified as having amyotrophic lateral sclerosis or a symptom of amyotrophic lateral sclerosis that is associated with a biased TCR clonotype that comprises the TCR variable region in TCRβ V7 subfamily or TCRβ V23 subfamily, and wherein the moiety that binds to the TCR variable region binds to the TCR variable domain in TCRβ V7 subfamily or TCRβ V23 subfamily, and wherein the moiety does not bind to any other different TCRαV and/or TCRβV subfamily.

[0144] In some aspects, provided herein is a method of reducing or depleting autoreactive T cells in a subject in need thereof, the method comprising administering to the subject a therapeutically effective amount of an agent comprising a moiety that binds to a TCR variable region, thereby inhibiting or preventing the activation and/or expansion of autoreactive T cells in the subject, wherein the TCR variable region is a T cell receptor alpha variable region (TCRαV) or a T cell receptor variable beta region (TCRβV), wherein the autoreactive T cells target an autologous cell in the subject, wherein the autoreactive T cells express TCRαV and/or TCRβV, and wherein: (a) the subject is identified as having amyotrophic lateral sclerosis or a symptom of amyotrophic lateral sclerosis that is associated with a biased TCR clonotype that comprises the TCR variable region in TCRβ V7 subfamily or TCRβ V23 subfamily, and wherein the moiety that binds to the TCR variable region binds to the TCR variable domain in TCRβ V7 subfamily or TCRβ V23 subfamily, or (b) the subject is identified as having amyotrophic lateral sclerosis or a symptom of amyotrophic lateral sclerosis that is associated with a biased TCR clonotype that comprises the TCR variable region in TCRβ V7 subfamily or TCRβ V23 subfamily, and wherein the moiety that binds to the TCR variable region binds to the TCR variable domain in TCRβ V7 subfamily or TCRβ V23 subfamily, and wherein the moiety does not bind to any other different TCRαV and/or TCRβV subfamily.

[0145] In some aspects, provided herein is a method of inhibiting or preventing activation and/or expansion of autoreactive T cells in a subject in need thereof, the method comprising administering to the subject a therapeutically effective amount of an agent comprising a moiety that binds to a TCR variable region, thereby inhibiting or preventing the activation and/or expansion of the autoreactive T cells in the subject, wherein the TCR variable region is a T cell receptor alpha variable region (TCRαV) or a T cell receptor beta variable region (TCRβV), wherein the autoreactive T cells target an autologous cell in the subject, wherein the autoreactive T cells express TCRαV and/or TCRβV, wherein: (a) the subject is identified as having celiac disease or a symptom of celiac disease that is associated with a biased TCR clonotype that comprises the TCR variable region in TCRα V26 subfamily, TCRα V4 subfamily, TCRβ V7 subfamily, or TCRβ V4 subfamily, and wherein the moiety that binds to the TCR variable region binds to the TCR variable domain in TCRα V26 subfamily, TCRα V4 subfamily, TCRβ V7 subfamily, or TCRβ V4 subfamily, or (b) the subject is identified as having celiac disease or a symptom of celiac disease that is associated with a biased TCR clonotype that comprises the TCR variable region in TCRα V26 subfamily, TCRα V4 subfamily, TCRβ V7 subfamily, or TCRβ V4 subfamily, and wherein the moiety that binds to the TCR variable region binds to the TCR variable domain in TCRα V26 subfamily, TCRα V4 subfamily, TCRβ V7 subfamily, or TCRβ V4 subfamily, and wherein the moiety does not bind to any other different TCRαV and/or TCRβV subfamily.

[0146] In some aspects, provided herein is a method of reducing or depleting autoreactive T cells in a subject in need thereof, the method comprising administering to the subject a therapeutically effective amount of an agent comprising a moiety that binds to a TCR variable region, thereby inhibiting or preventing the activation and/or expansion of autoreactive T cells in the subject, wherein the TCR variable region is a T cell receptor alpha variable region (TCRαV) or a T cell receptor variable beta region (TCRβV), wherein the autoreactive T cells target an autologous cell in the subject, wherein the autoreactive T cells express TCRαV and/or TCRβV, and wherein: (a) the subject is identified as having celiac disease or a symptom of celiac disease that is associated with a biased TCR clonotype that comprises the TCR variable region in TCRα V26 subfamily, TCRα V4 subfamily, TCRβ V7 subfamily, or TCRβ V4 subfamily, and wherein the moiety that binds to the TCR variable region binds to the TCR variable domain in TCRα V26 subfamily, TCRα V4 subfamily, TCRβ V7 subfamily, or TCRβ V4 subfamily, or (b) the subject is identified as having celiac disease or a symptom of celiac disease that is associated with a biased TCR clonotype that comprises the TCR variable region in TCRα V26 subfamily, TCRα V4 subfamily, TCRβ V7 subfamily, or TCRβ V4 subfamily, and wherein the moiety that binds to the TCR variable region binds to the TCR variable domain in TCRα V26 subfamily, TCRα V4 subfamily, TCRβ V7 subfamily, or TCRβ V4 subfamily, and wherein the moiety does not bind to any other different TCRαV and/or TCRβV subfamily.

[0147] In some aspects, provided herein is a method of inhibiting or preventing activation and/or expansion of autoreactive T cells in a subject in need thereof, the method comprising administering to the subject a therapeutically effective amount of an agent comprising a moiety that binds to a TCR variable region, thereby inhibiting or preventing the activation and/or expansion of the autoreactive T cells in the subject, wherein the TCR variable region is a T cell receptor alpha variable region (TCRαV) or a T cell receptor beta variable region (TCRβV), wherein the autoreactive T cells target an autologous cell in the subject, wherein the autoreactive T cells express TCRαV and/or TCRβV, wherein: (a) the subject is identified as having ankylosing spondylitis or a symptom of ankylosing spondylitis that is associated with a biased TCR clonotype that comprises the TCR variable region in TCRα V21 subfamily or TCRβ V9 subfamily, and wherein the moiety that binds to the TCR variable region binds to the TCR variable domain in TCRα V21 subfamily or TCRβ V9 subfamily, or (b) the subject is identified as having ankylosing spondylitis or a symptom of ankylosing spondylitis that is associated with a biased TCR clonotype that comprises the TCR variable region in TCRα V21 subfamily or TCRβ V9 subfamily, and wherein the moiety that binds to the TCR variable region binds to the TCR variable domain in TCRα V21 subfamily or TCRβ V9 subfamily, and wherein the moiety does not bind to any other different TCRαV and/or TCRβV subfamily.

[0148] In some aspects, provided herein is a method of reducing or depleting autoreactive T cells in a subject in need thereof, the method comprising administering to the subject a therapeutically effective amount of an agent comprising a moiety that binds to a TCR variable region, thereby inhibiting or preventing the activation and/or expansion of autoreactive T cells in the subject, wherein the TCR variable region is a T cell receptor alpha variable region (TCRαV) or a T cell receptor variable beta region (TCRβV), wherein the autoreactive T cells target an autologous cell in the subject, wherein the autoreactive T cells express TCRαV and/or TCRβV, and wherein: (a) the subject is identified as having ankylosing spondylitis or a symptom of ankylosing spondylitis that is associated with a biased TCR clonotype that comprises the TCR variable region in TCRα V21 subfamily or TCRβ V9 subfamily, and wherein the moiety that binds to the TCR variable region binds to the TCR variable domain in TCRα V21 subfamily or TCRβ V9 subfamily, or (b) the subject is identified as having ankylosing spondylitis or a symptom of ankylosing spondylitis that is associated with a biased TCR clonotype that comprises the TCR variable region in TCRα V21 subfamily or TCRβ V9 subfamily, and wherein the moiety that binds to the TCR variable region binds to the TCR variable domain in TCRα V21 subfamily or TCRβ V9 subfamily, and wherein the moiety does not bind to any other different TCRαV and/or TCRβV subfamily.

[0149] In some aspects, provided herein is a method of inhibiting or preventing activation and/or expansion of autoreactive T cells in a subject in need thereof, the method comprising administering to the subject a therapeutically effective amount of an agent comprising a moiety that binds to a TCR variable region, thereby inhibiting or preventing the activation and/or expansion of the autoreactive T cells in the subject, wherein the TCR variable region is a T cell receptor alpha variable region (TCRαV) or a T cell receptor beta variable region (TCRβV), wherein the autoreactive T cells target an autologous cell in the subject, wherein the autoreactive T cells express TCRαV and/or TCRβV, wherein: (a) the subject is identified as having COVID-induced multisystem inflammatory syndrome in children or a symptom of COVID-induced multisystem inflammatory syndrome in children that is associated with a biased TCR clonotype that comprises the TCR variable region in TCRβ VII subfamily, and wherein the moiety that binds to the TCR variable region binds to the TCR variable domain in TCRβ VII subfamily, or (b) the subject is identified as having COVID-induced multisystem inflammatory syndrome in children or a symptom of COVID-induced multisystem inflammatory syndrome in children that is associated with a biased TCR clonotype that comprises the TCR variable region in TCRβ VII subfamily, and wherein the moiety that binds to the TCR variable region binds to the TCR variable domain in TCRβ VII subfamily, and wherein the moiety does not bind to any other different TCRαV and/or TCRβV subfamily.

[0150] In some aspects, provided herein is a method of reducing or depleting autoreactive T cells in a subject in need thereof, the method comprising administering to the subject a therapeutically effective amount of an agent comprising a moiety that binds to a TCR variable region, thereby inhibiting or preventing the activation and/or expansion of autoreactive T cells in the subject, wherein the TCR variable region is a T cell receptor alpha variable region (TCRαV) or a T cell receptor variable beta region (TCRβV), wherein the autoreactive T cells target an autologous cell in the subject, wherein the autoreactive T cells express TCRαV and/or TCRβV, and wherein: (a) the subject is identified as having COVID-induced multisystem inflammatory syndrome in children or a symptom of COVID-induced multisystem inflammatory syndrome in children that is associated with a biased TCR clonotype that comprises the TCR variable region in TCRβ VII subfamily, and wherein the moiety that binds to the TCR variable region binds to the TCR variable domain in TCRβ VII subfamily, or (b) the subject is identified as having COVID-induced multisystem inflammatory syndrome in children or a symptom of COVID-induced multisystem inflammatory syndrome in children that is associated with a biased TCR clonotype that comprises the TCR variable region in TCRβ VII subfamily, and wherein the moiety that binds to the TCR variable region binds to the TCR variable domain in TCRβ VII subfamily, and wherein the moiety does not bind to any other different TCRαV and/or TCRβV subfamily.

[0151] In some aspects, provided herein is a method of inhibiting or preventing activation and/or expansion of autoreactive T cells in a subject in need thereof, the method comprising administering to the subject a therapeutically effective amount of an agent comprising a moiety that binds to a TCR variable region, thereby inhibiting or preventing the activation and/or expansion of the autoreactive T cells in the subject, wherein the TCR variable region is a T cell receptor alpha variable region (TCRαV) or a T cell receptor beta variable region (TCRβV), wherein the autoreactive T cells target an autologous cell in the subject, wherein the autoreactive T cells express TCRαV and/or TCRβV, wherein: (a) the subject is identified as having primary Sjogrens syndrome or a symptom of primary Sjogrens syndrome that is associated with a biased TCR clonotype that comprises the TCR variable region in TCRβ V6 subfamily, and wherein the moiety that binds to the TCR variable region binds to the TCR variable domain in TCRβ V6 subfamily, or (b) the subject is identified as having primary Sjogrens syndrome or a symptom of primary Sjogrens syndrome that is associated with a biased TCR clonotype that comprises the TCR variable region in TCRβ V6 subfamily, and wherein the moiety that binds to the TCR variable region binds to the TCR variable domain in TCRβ V6 subfamily, and wherein the moiety does not bind to any other different TCRαV and/or TCRβV subfamily.

[0152] In some aspects, provided herein is a method of reducing or depleting autoreactive T cells in a subject in need thereof, the method comprising administering to the subject a therapeutically effective amount of an agent comprising a moiety that binds to a TCR variable region, thereby inhibiting or preventing the activation and/or expansion of autoreactive T cells in the subject, wherein the TCR variable region is a T cell receptor alpha variable region (TCRαV) or a T cell receptor variable beta region (TCRβV), wherein the autoreactive T cells target an autologous cell in the subject, wherein the autoreactive T cells express TCRαV and/or TCRβV, and wherein: (a) the subject is identified as having primary Sjogrens syndrome or a symptom of primary Sjogrens syndrome that is associated with a biased TCR clonotype that comprises the TCR variable region in TCRβ V6 subfamily, and wherein the moiety that binds to the TCR variable region binds to the TCR variable domain in TCRβ V6 subfamily, or (b) the subject is identified as having primary Sjogrens syndrome or a symptom of primary Sjogrens syndrome that is associated with a biased TCR clonotype that comprises the TCR variable region in TCRβ V6 subfamily, and wherein the moiety that binds to the TCR variable region binds to the TCR variable domain in TCRβ V6 subfamily, and wherein the moiety does not bind to any other different TCRαV and/or TCRβV subfamily.

[0153] In some aspects, provided herein is a method of inhibiting or preventing activation and/or expansion of autoreactive T cells in a subject in need thereof, the method comprising administering to the subject a therapeutically effective amount of an agent comprising a moiety that binds to a TCR variable region, thereby inhibiting or preventing the activation and/or expansion of the autoreactive T cells in the subject, wherein the TCR variable region is a T cell receptor alpha variable region (TCRαV) or a T cell receptor beta variable region (TCRβV), wherein the autoreactive T cells target an autologous cell in the subject, wherein the autoreactive T cells express TCRαV and/or TCRβV, wherein: (a) the subject is identified as having Type I diabetes or a symptom Type I diabetes that is associated with a biased TCR clonotype that comprises the TCR variable region in TCRβ V12 subfamily or TCRα V12 subfamily, and wherein the moiety that binds to the TCR variable region binds to the TCR variable domain in TCRβ V12 subfamily or TCRα V12 subfamily, or (b) the subject is identified as having Type I diabetes or a symptom Type I diabetes that is associated with a biased TCR clonotype that comprises the TCR variable region in TCRβ V12 subfamily or TCRα V12 subfamily, and wherein the moiety that binds to the TCR variable region binds to the TCR variable domain in TCRβ V12 subfamily or TCRα V12 subfamily, and wherein the moiety does not bind to any other different TCRαV and/or TCRβV subfamily.

[0154] In some aspects, provided herein is a method of reducing or depleting autoreactive T cells in a subject in need thereof, the method comprising administering to the subject a therapeutically effective amount of an agent comprising a moiety that binds to a TCR variable region, thereby inhibiting or preventing the activation and/or expansion of autoreactive T cells in the subject, wherein the TCR variable region is a T cell receptor alpha variable region (TCRαV) or a T cell receptor variable beta region (TCRβV), wherein the autoreactive T cells target an autologous cell in the subject, wherein the autoreactive T cells express TCRαV and/or TCRβV, and wherein: (a) the subject is identified as having Type I diabetes or a symptom Type I diabetes that is associated with a biased TCR clonotype that comprises the TCR variable region in TCRβ V12 subfamily or TCRα V12 subfamily, and wherein the moiety that binds to the TCR variable region binds to the TCR variable domain in TCRβ V12 subfamily or TCRα V12 subfamily, or (b) the subject is identified as having Type I diabetes or a symptom Type I diabetes that is associated with a biased TCR clonotype that comprises the TCR variable region in TCRβ V12 subfamily or TCRα V12 subfamily, and wherein the moiety that binds to the TCR variable region binds to the TCR variable domain in TCRβ V12 subfamily or TCRα V12 subfamily, and wherein the moiety does not bind to any other different TCRαV and/or TCRβV subfamily.

### INCORPORATION BY REFERENCE

[0155] All publications, patents, and patent applications mentioned in this specification are herein incorporated by reference to the same extent as if each individual publication, patent, or patent application was specifically and individually indicated to be incorporated by reference.

### BRIEF DESCRIPTION OF THE DRAWINGS

[0156] The novel features of the disclosure are set forth with particularity in the appended claims. A better understanding of the features and advantages of the present disclosure will be obtained by reference to the following detailed description that sets forth illustrative embodiments, in which the principles of the disclosure are utilized, and the accompanying drawings of which:

[0157] FIGS. 1A-1B show the structure and sequence of eight TCRβV proteins from seven different subfamilies: TCRβV6 subfamily (TCRβV6-5 and TCRβV6-4 are shown), TCRβV28 subfamily, TCRβV19 subfamily, TCRβV9 subfamily, TCRβV5 subfamily, TCRβV20 subfamily and TCRβV12 subfamily. FIG. 1A shows the structural alignment of the different TCRβV proteins. The circled area represents the outward facing region comprising the proposed binding site for the anti-TCRβV antibodies as described herein. FIG. 1B shows the amino acid sequence alignment of the proteins shown in FIG. 1A (full-length sequences disclosed as SEQ ID NOS 3449-3456, respectively, in order of appearance and “3MFG” fragment disclosed as SEQ ID NO: 7517). The various TCRαV proteins (from 7 different TCRαV subfamilies) have diverse sequences but share a conserved (similar) structure and function.

[0158] FIG. 2 shows an exemplary embodiment of an anti-TCRαV molecule binding to an autoreactive T cell, e.g., a T cell expressing a TCRαV associated with an autoimmune disease, in order to inhibit the activation of or to kill the autoreactive T cell.

[0159] FIG. 3 shows an exemplary embodiment of an anti-TCRαV molecule functionally linked to a cytotoxic agent. The derivatized molecule can bind to a target autoreactive T cell, e.g. a T cell expressing a TCRαV associated with an autoimmune disease, and initiate killing of the target autoreactive T cell.

[0160] FIG. 4 shows an exemplary embodiment of a multifunctional molecule engineered to bind to a TCRαV on a target autoreactive T cell and to further contain a natural killer (NK) cell engager that binds to NKp30 expressed on NK cell.

[0161] FIG. 5 shows an exemplary embodiment of a multispecific molecule that binds to a TCRαV or TCRβV on a target autoreactive T cell and and to further contain a T cell engager that binds to a CD3 complex on a healthy effector T cell in the subject.

[0162] FIG. 6 shows an exemplary embodiment of an antibody molecule specific for TCRαV and/or TCRβV with Fe mutations to increase effector functions, such as antibody dependent cell-mediated cytotoxicity (ADCC), antibody-dependent cellular phagocytosis (ADCP), and/or complement dependent cytotoxicity (CDC).

[0163] FIG. 7 shows a representation of a CAR T cell with an antigen recognition domain for a TCRαV and/or TCRβV of a target autoreactive T cell, where the T cell expresses a TCRαV and/or TCRβV associated with an autoimmune disease.

[0164] FIG. 8 shows the frequency of TRBV13-1, 13-2, 13-3 transcript counts relative to all TRBV counts. Two animals per timepoint were dosed.

### DETAILED DESCRIPTION

[0165] Disclosed herein, in some aspects, are methods of treating autoimmune diseases or conditions using TCR targeting molecules or cells expressing TCR targeting molecules. TCR targeting molecules can comprise a moiety that binds to a TCR variable beta chain (TCRBV) or a TCR variable alpha chain (TCRAV). TCR targeting molecules can further comprise one, two or all of: (ii) an immune cell engager; (iii) a cytokine inhibitor molecule; (iv) a cytotoxic agent; and/or (v) a death receptor signal enhancer.

[0166] Without wishing to be bound by theory, a TCR bias may exist in autoimmune diseases. This bias may be associated with dominant autoreactive TCR clones responsible for disease or associated with symptoms. Re-balancing the TCR repertoire, e.g., by eliminating or depleting T cells comprising an autoreactive clonotype, may treat the associated autoimmune disease and/or reduce symptoms of the autoimmune disease. Accordingly, the multispecific or multifunctional molecules disclosed herein are expected to target (e.g., localize, bridge and/or activate) an immune cell (e.g., an immune effector cell chosen from an NK cell, a T cell, a B cell, a dendritic cell or a macrophage), at a target cell (e.g., a T cell comprising a biased TCRAV or TCRBV clonotype or comprising a TCRAV or TCRBV antigen corresponding to a biased TCRAV or TCRBV clonotype). Increasing the proximity and/or activity of the immune cell using the multispecific molecules described herein is expected to enhance an immune response against the target cell (e.g., the T cell comprising a TCRAV or TCRBV, e.g., a TCRAV or TCRBV antigen corresponding to a biased TCRAV or TCRBV clonotype), thereby providing a more effective therapy (e.g., a more effective autoimmune disease therapy). Without being bound by theory, a targeted, localized immune response against the target cell (e.g., a T cell comprising a biased TCRAV or TCRBV clonotype is believed to reduce the effects of systemic toxicity of the multispecific molecules described herein. A targeted immune response against the autoreactive T cell population that targets non-autoreactive T cells to a lesser degree (e.g., does not target non-autoreactive T cells) is believed to have fewer deleterious effects than systemic ablation of all T cells.

[0167] Accordingly, provided herein are, inter alia, TCR targeting molecules (e.g., multispecific or multifunctional antibody molecules) that include the aforesaid moieties, nucleic acids encoding the same, methods of producing the aforesaid molecules, and methods of treating autoimmune disease using the aforesaid molecules. Also provided herein are anti-TCRαV or anti-TCRβV antibody molecules, nucleic acids encoding the same, methods of producing the aforesaid molecules, and methods of treating autoimmune disease using the anti-TCRαV or anti-TCRAV antibody molecules.

[0168] Further provided are methods for depletion (e.g., in vivo depletion) of biased TCRBV clonotypes, e.g., in the context of autoimmune disease with a multispecific molecule or an anti-TCRαV or anti-TCRβV antibody molecule. In some embodiments, the method involves identifying in a patient a clonal bias in TCRAV or TCRBV usage, e.g., associated with the autoreactive subpopulation, and responsive to this analysis administering a multifunctional molecule targeted to the TCRAV or TCRBV antigen corresponding to the biased TCRAV or TCRBV clonotype to decrease, e.g., eliminate, the clonal bias and promote, e.g., establish, a normal TCRBV distribution.

[0169] Accordingly, in one aspect, the disclosure features a multifunctional molecule, comprising: (i) a first antigen binding domain that binds to, e.g., selectively binds to, T cell receptor variable alpha (TCRAV), e.g., a TCRAV antigen, and (ii) one, two, or all of: (a) an immune cell engager chosen from an NK cell engager, a T cell engager, a B cell engager, a dendritic cell engager, or a macrophage cell engager; (b) a cytokine molecule or cytokine inhibitor molecule; and (c) a death receptor signal engager.

[0170] In another aspect, the disclosure features a multifunctional molecule, comprising: (i) a first antigen binding domain that binds to, e.g., selectively binds to, T cell receptor variable beta (TCRBV), e.g., a TCRBV antigen, and (ii) one, two, or all of: (a) an immune cell engager chosen from an NK cell engager, a T cell engager, a B cell engager, a dendritic cell engager, or a macrophage cell engager; (b) a cytokine molecule or cytokine inhibitor molecule; and (c) a death receptor signal engager.

[0171] In some embodiments, first antigen binding domain comprises an anti-TCRαV antibody molecule, e.g., as described herein.

[0172] In some embodiments, first antigen binding domain comprises an anti-TCRβV antibody molecule, e.g., as described herein.

[0173] In another aspect, the disclosure features a nucleic acid molecule encoding a multifunctional molecule disclosed herein.

[0174] In another aspect, the disclosure features a vector, e.g., an expression vector, comprising the nucleic acid molecules disclosed herein.

[0175] In another aspect, the disclosure features a host cell comprising a nucleic acid molecule or vector disclosed herein.

[0176] In another aspect, the disclosure features a method of making, e.g., producing, a multifunctional molecule disclosed herein, comprising culturing a host cell disclosed herein under suitable conditions, e.g., conditions suitable for gene expression and/or homo- or heterodimerization.

[0177] In another aspect, the disclosure features a pharmaceutical composition comprising a multifunctional molecule disclosed herein.

[0178] In another aspect, the disclosure features a method of treating a TCR bias, comprising administering to a subject in need thereof a multifunctional molecule disclosed herein, wherein the multifunctional molecule is administered in an amount effective to treat the TCR bias.

[0179] In another aspect, the disclosure features a method of treating an autoimmune disease (e.g., an autoimmune disease associated with a TCR bias), comprising administering to a subject in need thereof a multifunctional molecule disclosed herein, wherein the multifunctional molecule is administered in an amount effective to treat the autoimmune disease.

[0180] In another aspect, the disclosure features a method of identifying a subject in need of treatment for TCR bias or an autoimmune disease (e.g., associated with a TCR bias) using a multifunctional molecule disclosed herein, comprising determining (e.g., directly determining or indirectly determining, e.g., obtaining information regarding) whether a subject has a TCR bias (e.g., a biased TCRAV or TCRBV clonotype) and/or an autoimmune disease associated with said bias, wherein: responsive to determining that the subject has a TCR bias (e.g., a biased TCRAV or TCRBV clonotype) and/or an autoimmune disease associated with said bias, identifying the subject as a candidate for treatment using a multifunctional molecule comprising an antigen binding domain that binds to the TCRAV or TCRBV antigen.

[0181] In another aspect, the disclosure features a method of evaluating a subject in need of treatment for a TCR bias (e.g., a biased TCRAV or TCRBV clonotype) and/or an autoimmune disease associated with said bias, comprising determining (e.g., directly determining or indirectly determining, e.g., obtaining information regarding) whether a subject has a TCR bias (e.g., a biased TCRAV or TCRBV clonotype).

[0182] In yet another aspect, disclosed herein is a method of treating an autoimmune disease (e.g., an autoimmune disease associated with a TCR bias), in a subject in need thereof, comprising administering to said subject an effective amount, e.g., a therapeutically effective amount, of an antibody molecule which binds (e.g., specifically binds) to a T cell receptor alpha variable region (TCRαV) (“anti-TCRαV antibody molecule”) or a T cell receptor beta variable region (TCRαV) (“anti-TCRβV antibody molecule”), thereby treating the disorder.

[0183] In another aspect, the disclosure provides a method of depleting a population of T cells in a subject having an autoimmune disorder (e.g., an autoimmune disease associated with a TCR bias), comprising, contacting the T cell population with an effective amount of an antibody molecule which binds (e.g., specifically binds) to a T cell receptor alpha variable region (TCRαV) (“anti-TCRαV antibody molecule”) or a T cell receptor beta variable region (TCRβV) (“anti-TCRβV antibody molecule”).

[0184] In another aspect, the disclosure features a nucleic acid molecule encoding an anti-TCRαV or anti-TCRβV antibody molecule disclosed herein.

[0185] In another aspect, the disclosure features a vector, e.g., an expression vector, comprising the nucleic acid molecules disclosed herein.

[0186] In another aspect, the disclosure features a host cell comprising a nucleic acid molecule or vector disclosed herein.

[0187] In another aspect, the disclosure features a method of making, e.g., producing, an anti-TCRαV or anti-TCRβV antibody molecule disclosed herein, comprising culturing a host cell disclosed herein under suitable conditions, e.g., conditions suitable for gene expression and/or homo- or heterodimerization.

[0188] In another aspect, the disclosure features a pharmaceutical composition comprising an anti-TCRβV antibody molecule disclosed herein.

[0189] Disclosed herein, in some aspects, are TCR targeting molecules that comprise an antigen binding domain that binds to, e.g., selectively binds to, T cell receptor variable beta (TCRBV), e.g., a TCRBV antigen. In some cases, the TCR targeting molecules comprise a Fc region that comprises one or more binding mutations that enhance effector function of the Fc region, such as antibody dependent cell-mediated cytotoxicity (ADCC), antibody-dependent cellular phagocytosis (ADCP) or complement dependent cytotoxicity (CDC). In some cases, the TCR targeting molecules comprise a Fc region that does not comprise a binding mutation.

[0190] Disclosed herein, in some aspects, are TCR targeting molecules that include a plurality of (e.g., two or more) functionalities (or binding specificities) (also referred to herein as multifunctional molecules or multispecific molecules), comprising (i) an antigen binding domain that binds to, e.g., selectively binds to, T cell receptor variable beta (TCRBV), e.g., a TCRBV antigen, and (ii) one, two, or all of: (a) an immune cell engager chosen from a T cell engager, an NK cell engager (e.g., a molecule that binds to NKp30, NKp46, NKG2D, or CD16), a B cell engager, a dendritic cell engager, or a macrophage cell engager; (b) a cytokine inhibitor molecule; (c) a cytotoxic agent; (d) a death receptor signal engager.

[0191] In an embodiment, the TCR targeting molecule is a bispecific (or bifunctional) molecule, a trispecific (or trifunctional) molecule, or a tetraspecific (or tetrafunctional) molecule.

[0192] In some embodiments, the TCR targeting molecule comprises an antigen binding domain that binds a TCRAV or TCRBV antigen on the surface of a lymphocyte, e.g., T cell. In some embodiments, the TCRAV or TCRBV antigen corresponds to a biased TCRAV or TCRBV clonotype, e.g., TCRs comprising the TCRAV or TCRBV antigen may be over-represented in the TCR repertoire or lymphocyte (e.g., T cell) pool of a subject (e.g., subjects with autoimmune disease associated with TCR bias), or expressed at a level that is higher than the level in other subjects (e.g., non-autoimmune disease subjects).

[0193] Without being bound by theory, the TCR targeting molecules disclosed herein are expected to localize (e.g., bridge) and/or activate an immune cell (e.g., an immune effector cell chosen from a T cell, an NK cell, a B cell, a dendritic cell or a macrophage), in the presence of a cell (e.g., a lymphocyte, e.g., T cell) expressing the TCRAV or TCRBV antigen (e.g., a TCRAV or TCRBV antigen corresponding to a biased TCRAV or TCRBV clonotype), e.g., on the cell surface. Increasing the proximity and/or activity of the immune cell, in the presence of the cell (e.g., a lymphocyte, e.g., T cell) expressing the TCRAV or TCRBV antigen (e.g., a TCRAV or TCRBV antigen corresponding to a biased TCRAV or TCRBV clonotype) using the TCR targeting molecules described herein is expected to enhance an immune response against the target cell, thereby providing a more effective therapy (e.g., by decreasing the level of the biased TCR and/or T cell expressing the biased TCR). In another embodiment, targeting a cell (e.g., a lymphocyte, e.g., T cell) expressing the TCRAV or TCRBV antigen (e.g., a TCRAV or TCRBV antigen corresponding to a biased TCRAV or TCRBV clonotype) with a TCR targeting molecule also comprising a cell death inducing moiety (e.g., a death receptor signal engager) is thought to promote the death of the target cell (e.g., by decreasing the level of the biased TCR and/or T cell expressing the biased TCR).

[0194] Without being bound by theory, by utilizing, in some embodiments, a TCR targeting molecule specific for a particular TCRAV or TCRBV antigen (e.g., a TCRAV or TCRBV antigen corresponding to a biased TCRAV or TCRBV clonotype), but not with specificity for other or all types of T cell receptors, it is expected that the deleterious effects of increasing the proximity or activity of immune cells toward T cells generally or promoting cell death in T cells generally may be mitigated. In this way, it is thought that use of the TCR targeting molecules disclosed herein may increase the proximity or activity of immune cells toward cells comprising TCRAV or TCRBV antigen corresponding to a biased TCRAV or TCRBV clonotype without necessarily increasing proximity or activity of immune cells toward T cells generally, or promote cell death in cells comprising TCRAV or TCRBV antigen corresponding to a biased TCRBV clonotype without necessarily increasing cell death in T cells generally.

[0195] Accordingly, provided herein are, inter alia, TCR targeting molecules (e.g., multifunctional antibody molecules) that include the aforesaid moieties, nucleic acids encoding the same, methods of producing the aforesaid molecules, and methods of treating a disease or disorder, e.g., an autoimmune disease or a TCR bias, using the aforesaid molecules.

### Certain Terminology

[0196] Certain specific details of this description are set forth in order to provide a thorough understanding of various embodiments. However, one skilled in the art will understand that the present disclosure may be practiced without these details. In other instances, well-known structures have not been shown or described in detail to avoid unnecessarily obscuring descriptions of the embodiments.

[0197] Unless the context requires otherwise, throughout the specification and claims which follow, the word “comprise” and variations thereof, such as, “comprises” and “comprising” are to be construed in an open, inclusive sense, that is, as “including, but not limited to.” Further, headings provided herein are for convenience only and do not interpret the scope or meaning of the claimed disclosure.

[0198] As used in this specification and the appended claims, the singular forms “a,” “an,” and “the” include plural referents unless the content clearly dictates otherwise. The use of the words “a” or “an” when used in conjunction with the term “comprising” herein may mean “one,” but it is also consistent with the meaning of “one or more,” “at least one,” and “one or more than one.”

[0199] It should also be noted that the term “or” is generally employed in its sense including “and/or” unless the content clearly dictates otherwise.

[0200] Unless otherwise defined, all technical and scientific terms used herein have the same meaning as commonly understood by one of ordinary skill in the art to which this disclosure belongs. Although methods and materials similar or equivalent to those described herein can be used in the practice or testing of the present disclosure, suitable methods and materials are described below.

[0201] The term “about” when referring to a measurable value such as an amount, a temporal duration, and the like, is meant to encompass variations of 20% or in some instances ±10%, or in some instances ±5%, or in some instances ±1%, or in some instances ±0.1% from the specified value, as such variations are appropriate to perform the disclosed methods. As used herein, “about” and “approximately” generally mean an acceptable degree of error for the quantity measured given the nature or precision of the measurements. Exemplary degrees of error are within 20 percent (%), typically, within 10%, and more typically, within 5% of a given range of values.

[0202] The term “acquire” or “acquiring” as the terms are used herein, refer to obtaining possession of a physical entity (e.g., a sample, a polypeptide, a nucleic acid, or a sequence), or a value, e.g., a numerical value, by “directly acquiring” or “indirectly acquiring” the physical entity or value. “Directly acquiring” means performing a process (e.g., performing a synthetic or analytical method) to obtain the physical entity or value. “Indirectly acquiring” refers to receiving the physical entity or value from another party or source (e.g., a third party laboratory that directly acquired the physical entity or value). Directly acquiring a physical entity includes performing a process that includes a physical change in a physical substance, e.g., a starting material. Directly acquiring a value includes performing a process that includes a physical change in a sample or another substance, e.g., performing an analytical process which includes a physical change in a substance, e.g., a sample.

[0203] “Antibody molecule” as used herein refers to a protein, e.g., an immunoglobulin chain or fragment thereof, comprising at least one immunoglobulin variable domain structure and/or sequence. An antibody molecule encompasses antibodies (e.g., full-length antibodies) and antibody fragments. In some embodiments, an antibody molecule comprises an antigen binding or functional fragment of a full length antibody, or a full length immunoglobulin chain. For example, a full-length antibody is an immunoglobulin (Ig) molecule (e.g., an IgG antibody) that is naturally occurring or formed by normal immunoglobulin gene fragment recombinatorial processes). In embodiments, an antibody molecule refers to an immunologically active, antigen-binding portion of an immunoglobulin molecule, such as an antibody fragment. An antibody fragment, e.g., functional fragment, is a portion of an antibody, e.g., Fab, Fab′, F(ab′)2, F(ab)2, variable fragment (Fv), domain antibody (dAb), or single chain variable fragment (scFv). A functional antibody fragment binds to the same antigen as that recognized by the intact (e.g., full-length) antibody. The terms “antibody fragment” or “functional fragment” also include isolated fragments consisting of the variable regions, such as the “Fv” fragments consisting of the variable regions of the heavy and light chains or recombinant single chain polypeptide molecules in which light and heavy variable regions are connected by a peptide linker (“scFv proteins”). In some embodiments, an antibody fragment does not include portions of antibodies without antigen binding activity, such as Fc fragments or single amino acid residues. Exemplary antibody molecules include full length antibodies and antibody fragments, e.g., dAb (domain antibody), single chain, Fab, Fab′, and F(ab′)2 fragments, and single chain variable fragments (scFvs). In some embodiments, the antibody molecule is an antibody mimetic. In some embodiments, the antibody molecule is, or comprises, an antibody-like framework or scaffold, such as, fibronectins, ankyrin repeats (e.g., designed ankyrin repeat proteins (DARPins)), avimers, affibody affinity ligands, anticalins, or affilin molecules.

[0204] The term “human-like antibody molecule” as used herein refers to a humanized antibody molecule, human antibody molecule or an antibody molecule having at least 95% sequence identity with a non-murine germline framework region, e.g., FR1, FR2, FR3 and/or FR4. In some embodiments, the human-like antibody molecule comprises a framework region having at least 95% sequence identity to a human germline framework region, e.g., a FR1, FR2, FR3 and/or FR4 of a human germline framework region. In some embodiments, the human-like antibody molecule is a recombinant antibody. In some embodiments, the human-like antibody molecule is a humanized antibody molecule. In some embodiments, the human-like antibody molecule is human antibody molecule. In some embodiments, the human-like antibody molecule is a phage display or a yeast display antibody molecule. In some embodiments, the human-like antibody molecule is a chimeric antibody molecule. In some embodiments, the human-like antibody molecule is a CDR grafted antibody molecule.

[0205] As used herein, an “immunoglobulin variable domain sequence” refers to an amino acid sequence which can form the structure of an immunoglobulin variable domain. For example, the sequence may include all or part of the amino acid sequence of a naturally-occurring variable domain. For example, the sequence may or may not include one, two, or more N- or C-terminal amino acids, or may include other alterations that are compatible with formation of the protein structure.

[0206] In embodiments, an antibody molecule is monospecific, e.g., it comprises binding specificity for a single epitope. In some embodiments, an antibody molecule is multispecific, e.g., it comprises a plurality of immunoglobulin variable domain sequences, where a first immunoglobulin variable domain sequence has binding specificity for a first epitope and a second immunoglobulin variable domain sequence has binding specificity for a second epitope. In some embodiments, an antibody molecule is a bispecific antibody molecule. “Bispecific antibody molecule” as used herein refers to an antibody molecule that has specificity for more than one (e.g., two, three, four, or more) epitope and/or antigen.

[0207] “Antigen” (Ag) as used herein refers to a molecule that can provoke an immune response, e.g., involving activation of certain immune cells and/or antibody generation. Any macromolecule, including almost all proteins or peptides, can be an antigen. Antigens can also be derived from genomic recombinant or DNA. For example, any DNA comprising a nucleotide sequence or a partial nucleotide sequence that encodes a protein capable of eliciting an immune response encodes an “antigen.” In embodiments, an antigen does not need to be encoded solely by a full length nucleotide sequence of a gene, nor does an antigen need to be encoded by a gene at all. As used, herein an “immune cell antigen” includes any molecule present on, or associated with, an immune cell that can provoke an immune response.

[0208] The “antigen-binding site,” or “binding portion” of an antibody molecule refers to the part of an antibody molecule, e.g., an immunoglobulin (Ig) molecule, that participates in antigen binding. In embodiments, the antigen binding site is formed by amino acid residues of the variable (V) regions of the heavy (H) and light (L) chains. Three highly divergent stretches within the variable regions of the heavy and light chains, referred to as hypervariable regions, are disposed between more conserved flanking stretches called “framework regions,” (FRs). FRs are amino acid sequences that are naturally found between, and adjacent to, hypervariable regions in immunoglobulins. In embodiments, in an antibody molecule, the three hypervariable regions of a light chain and the three hypervariable regions of a heavy chain are disposed relative to each other in three dimensional space to form an antigen-binding surface, which is complementary to the three-dimensional surface of a bound antigen. The three hypervariable regions of each of the heavy and light chains are referred to as “complementarity-determining regions,” or “CDRs.” The framework region and CDRs have been defined and described, e.g., in Kabat, E. A., et al. (1991) Sequences of Proteins of Immunological Interest, Fifth Edition, U.S. Department of Health and Human Services, NIH Publication No. 91-3242, and Chothia, C. et al. (1987) J. Mol. Biol. 196:901-917. Each variable chain (e.g., variable heavy chain and variable light chain) is typically made up of three CDRs and four FRs, arranged from amino-terminus to carboxy-terminus in the amino acid order: FRI, CDR1, FR2, CDR2, FR3, CDR3, and FR4.

[0209] As used herein, an “immune cell” refers to any of various cells that function in the immune system, e.g., to protect against agents of infection and foreign matter. In embodiments, this term includes leukocytes, e.g., neutrophils, eosinophils, basophils, lymphocytes, and monocytes. Innate leukocytes include phagocytes (e.g., macrophages, neutrophils, and dendritic cells), mast cells, eosinophils, basophils, and natural killer cells. Innate leukocytes identify and eliminate pathogens, either by attacking larger pathogens through contact or by engulfing and then killing microorganisms, and are mediators in the activation of an adaptive immune response. The cells of the adaptive immune system are special types of leukocytes, called lymphocytes. B cells and T cells are important types of lymphocytes and are derived from hematopoietic stem cells in the bone marrow. B cells are involved in the humoral immune response, whereas T cells are involved in cell-mediated immune response. The term “immune cell” includes immune effector cells.

[0210] “Immune effector cell,” as that term is used herein, refers to a cell that is involved in an immune response, e.g., in the promotion of an immune effector response. Examples of immune effector cells include, but are not limited to, T cells, e.g., alpha/beta T cells and gamma/delta T cells, B cells, natural killer (NK) cells, natural killer T (NK T) cells, and mast cells.

[0211] The term “effector function” or “effector response” refers to a specialized function of a cell. Effector function of a T cell, for example, may be cytolytic activity or helper activity including the secretion of cytokines.

[0212] The terms “polypeptide”, “peptide” and “protein” (if single chain) are used interchangeably herein to refer to polymers of amino acids of any length. The polymer may be linear or branched, it may comprise modified amino acids, and it may be interrupted by non-amino acids. The terms also encompass an amino acid polymer that has been modified; for example, disulfide bond formation, glycosylation, lipidation, acetylation, phosphorylation, or any other manipulation, such as conjugation with a labeling component. The polypeptide can be isolated from natural sources, can be a produced by recombinant techniques from a eukaryotic or prokaryotic host, or can be a product of synthetic procedures.

[0213] The terms “nucleic acid,” “nucleic acid sequence,” “nucleotide sequence,” or “polynucleotide sequence,” and “polynucleotide” are used interchangeably. They refer to a polymeric form of nucleotides of any length, either deoxyribonucleotides or ribonucleotides, or analogs thereof. The polynucleotide may be either single-stranded or double-stranded, and if single-stranded may be the coding strand or non-coding (antisense) strand. A polynucleotide may comprise modified nucleotides, such as methylated nucleotides and nucleotide analogs. The sequence of nucleotides may be interrupted by non-nucleotide components. A polynucleotide may be further modified after polymerization, such as by conjugation with a labeling component. The nucleic acid may be a recombinant polynucleotide, or a polynucleotide of genomic, cDNA, semisynthetic, or synthetic origin which either does not occur in nature or is linked to another polynucleotide in a non-natural arrangement.

[0214] The term “isolated,” as used herein, refers to material that is removed from its original or native environment (e.g., the natural environment if it is naturally occurring). For example, a naturally-occurring polynucleotide or polypeptide present in a living animal is not isolated, but the same polynucleotide or polypeptide, separated by human intervention from some or all of the co-existing materials in the natural system, is isolated. Such polynucleotides could be part of a vector and/or such polynucleotides or polypeptides could be part of a composition, and still be isolated in that such vector or composition is not part of the environment in which it is found in nature. An isolated polynucleotide (ribonucleic acid (RNA), deoxyribonucleic acid (DNA)), or polypeptide is free of the genes/nucleic acids or sequences/amino acids that flank it in its naturally-occurring state.

[0215] The compositions and methods of the present invention encompass polypeptides and nucleic acids having the sequences specified, or sequences substantially identical or similar thereto, e.g., sequences at least 80%, 85%, 90%, 95% identical or higher to the sequence specified. In the context of an amino acid sequence, the term “substantially identical” is used herein to refer to a first amino acid that contains a sufficient or minimum number of amino acid residues that are i) identical to, or ii) conservative substitutions of aligned amino acid residues in a second amino acid sequence such that the first and second amino acid sequences can have a common structural domain and/or common functional activity. For example, amino acid sequences that contain a common structural domain having at least about 80%, 85%, 90%, 91%, 92%, 93%, 94%, 95%, 96%, 97%, 98% 99%, 99.5%, 99.9%, or 100% sequence identity to a reference sequence, e.g., a sequence provided herein. In the context of nucleotide sequence, the term “substantially identical” is used herein to refer to a first nucleic acid sequence that contains a sufficient or minimum number of nucleotides that are identical to aligned nucleotides in a second nucleic acid sequence such that the first and second nucleotide sequences encode a polypeptide having common functional activity, or encode a common structural polypeptide domain or a common functional polypeptide activity. For example, nucleotide sequences having at least about 80%, 85%, 90%, 91%, 92%, 93%, 94%, 95%, 96%, 97%, 98% 99%, 99.5%, 99.9%, or 100% sequence identity to a reference sequence, e.g., a sequence provided herein.

[0216] The term “variant” refers to a polypeptide that has a substantially identical amino acid sequence to a reference amino acid sequence, or is encoded by a substantially identical nucleotide sequence. In some embodiments, the variant is a functional variant. In some embodiments, a TCRβV variant can bind to TCRα and form a TCR α:β complex.

[0217] The term “functional variant” refers to a polypeptide that has a substantially identical amino acid sequence to a reference amino acid sequence, or is encoded by a substantially identical nucleotide sequence, and is capable of having one or more activities of the reference amino acid sequence.

[0218] Calculations of homology or sequence identity between sequences (the terms are used interchangeably herein) are performed as follows. To determine the percent identity of two amino acid sequences, or of two nucleic acid sequences, the sequences are aligned for optimal comparison purposes (e.g., gaps can be introduced in one or both of a first and a second amino acid or nucleic acid sequence for optimal alignment and non-homologous sequences can be disregarded for comparison purposes). In a preferred embodiment, the length of a reference sequence aligned for comparison purposes is at least 30%, preferably at least 40%, more preferably at least 50%, 60%, and even more preferably at least 70%, 80%, 90%, 100% of the length of the reference sequence. The amino acid residues or nucleotides at corresponding amino acid positions or nucleotide positions are then compared. When a position in the first sequence is occupied by the same amino acid residue or nucleotide as the corresponding position in the second sequence, then the molecules are identical at that position (as used herein amino acid or nucleic acid “identity” is equivalent to amino acid or nucleic acid “homology”).

[0219] The percent identity between the two sequences is a function of the number of identical positions shared by the sequences, taking into account the number of gaps, and the length of each gap, which need to be introduced for optimal alignment of the two sequences. The comparison of sequences and determination of percent identity between two sequences can be accomplished using a mathematical algorithm. In a preferred embodiment, the percent identity between two amino acid sequences is determined using the Needleman and Wunsch ((1970) J. Mol. Biol. 48:444-453) algorithm which has been incorporated into the GAP program in the GCG software package (available at http://www.geg.com), using either a Blossum 62 matrix or a PAM250 matrix, and a gap weight of 16, 14, 12, 10, 8, 6, or 4 and a length weight of 1, 2, 3, 4, 5, or 6. In yet another preferred embodiment, the percent identity between two nucleotide sequences is determined using the GAP program in the GCG software package (available at http://www.geg.com), using a NWSgapdna.CMP matrix and a gap weight of 40, 50, 60, 70, or 80 and a length weight of 1, 2, 3, 4, 5, or 6. A particularly preferred set of parameters (and the one that should be used unless otherwise specified) are a Blossum 62 scoring matrix with a gap penalty of 12, a gap extend penalty of 4, and a frameshift gap penalty of 5.

[0220] The percent identity between two amino acid or nucleotide sequences can be determined using the algorithm of E. Meyers and W. Miller ((1989) CABIOS, 4:11-17) which has been incorporated into the ALIGN program (version 2.0), using a PAM120 weight residue table, a gap length penalty of 12 and a gap penalty of 4. The nucleic acid and protein sequences described herein can be used as a “query sequence” to perform a search against public databases to, for example, identify other family members or related sequences. Such searches can be performed using the NBLAST and XBLAST programs (version 2.0) of Altschul, et al. (1990) J. Mol. Biol. 215:403-10. BLAST nucleotide searches can be performed with the NBLAST program, score=100, wordlength=12 to obtain nucleotide sequences homologous to a nucleic acid molecule of the invention. BLAST protein searches can be performed with the XBLAST program, score=50, wordlength=3 to obtain amino acid sequences homologous to protein molecules of the invention. To obtain gapped alignments for comparison purposes, Gapped BLAST can be utilized as described in Altschul et al., (1997) Nucleic Acids Res. 25:3389-3402. When utilizing BLAST and Gapped BLAST programs, the default parameters of the respective programs (e.g., XBLAST and NBLAST) can be used.

[0221] It is understood that the molecules of the present invention may have additional conservative or non-essential amino acid substitutions, which do not have a substantial effect on their functions.

[0222] The term “amino acid” is intended to embrace all molecules, whether natural or synthetic, which include both an amino functionality and an acid functionality and capable of being included in a polymer of naturally-occurring amino acids. Exemplary amino acids include naturally-occurring amino acids; analogs, derivatives and congeners thereof; amino acid analogs having variant side chains; and all stereoisomers of any of any of the foregoing. As used herein the term “amino acid” includes both the D- or L-optical isomers and peptidomimetics.

[0223] A “conservative amino acid substitution” is one in which the amino acid residue is replaced with an amino acid residue having a similar side chain. Families of amino acid residues having similar side chains have been defined in the art. These families include amino acids with basic side chains (e.g., lysine, arginine, histidine), acidic side chains (e.g., aspartic acid, glutamic acid), uncharged polar side chains (e.g., glycine, asparagine, glutamine, serine, threonine, tyrosine, cysteine), nonpolar side chains (e.g., alanine, valine, leucine, isoleucine, proline, phenylalanine, methionine, tryptophan), beta-branched side chains (e.g., threonine, valine, isoleucine) and aromatic side chains (e.g., tyrosine, phenylalanine, tryptophan, histidine).

[0224] As used herein, the term “molecule” as used in, e.g., antibody molecule, cytokine molecule, receptor molecule, includes full-length, naturally-occurring molecules, as well as variants, e.g., functional variants (e.g., truncations, fragments, mutated (e.g., substantially similar sequences) or derivatized form thereof), so long as at least one function and/or activity of the unmodified (e.g., naturally-occurring) molecule remains.

[0225] As used herein, the term “mutation” refers to an alteration in the nucleotide sequence of the genome of an organism, virus, or extrachromosomal DNA. In some embodiments, the mutation may be a large-scale mutation, such as amplifications (or gene duplications) or repetitions of a chromosomal segment, deletions of large chromosomal regions, chromosomal rearrangements (e.g., chromosomal translocations, chromosomal inversions, non-homologous chromosomal crossover, and interstitial deletions), and loss of heterozygosity. In some embodiments, the mutation may be a small-scale mutation, such as insertions, deletions, and substitution mutations. As used herein, the term “substitution mutation” refers to the transition that exchange a single nucleotide for another.

[0226] In some embodiments, the agent is the TCR targeting molecule as provided herein.

### Human T Cell Receptor (TCR) Complex

[0227] TCR is a disulfide-linked membrane-anchored heterodimeric protein normally consisting of the highly variable alpha (α) and beta (β) chains expressed as part of a complex with the invariant CD3 chain molecules. TCR on αβ T cells is formed by a heterodimer of one alpha chain and one beta chain. Each alpha or beta chain consists of a constant domain and a highly variable domain classified as the Immunoglobulin superfamily (IgSF) fold. The TCRβV chains can be further classified into 30 subfamilies (TRBV1-30). Despite their high structural and functional homology, the amino acid sequence homology in the TRBV genes is very low. Only 4 amino acids out of approximately 95 are identical while 10 additional amino acids are conserved among all subfamilies (see, an alignment of TCRBV amino acid sequences in Table 8). Nevertheless, TCRs formed between alpha and beta chains of highly diverse sequences show a remarkable structural homology (FIGS. 1A and 1B) and elicit a similar function, e.g., activation of T cells.

[0228] T cell receptors (TCR) can be found on the surface of T cells. TCRs recognize antigens, e.g., peptides, presented on, e.g., bound to, major histocompatibility complex (MHC) molecules on the surface of cells, e.g., antigen-presenting cells. TCRs are heterodimeric molecules and can comprise an alpha chain, a beta chain, a gamma chain or a delta chain. TCRs comprising an alpha chain and a beta chain are also referred to as TCRαβ. The TCR beta chain consists of the following regions (also known as segments): variable (V), diversity (D), joining (J) and constant (C) (see Mayer G. and Nyland J. (2010) Chapter 10: Major Histocompatibility Complex and T-cell Receptors-Role in Immune Responses. In: Microbiology and Immunology on-line, University of South Carolina School of Medicine). The TCR alpha chain consists of V, J and C regions. The rearrangement of the T-cell receptor (TCR) through somatic recombination of V (variable), D (diversity), J (joining), and C (constant) regions is a defining event in the development and maturation of a T cell. TCR gene rearrangement takes place in the thymus.

[0229] TCRs can comprise a receptor complex, known as the TCR complex, which comprises a TCR heterodimer comprising of an alpha chain and a beta chain, and dimeric signaling molecules, e.g., CD3 co-receptors, e.g., CD3δ/ε, and/or CD3γ/ε.

[0230] As used herein, the term “T cell receptor alpha variable chain” or “TCRαV,” or “TRAV,” refers to an extracellular region of the T cell receptor alpha chain which can comprise a portion of the antigen recognition domain of the T cell receptor. The term TCRαV includes isoforms, mammalian, e.g., human TCRαV, species homologs of human and analogs comprising at least one common epitope with TCRαV. Human TCRαV comprises a gene family comprising subfamilies including, but not limited to: a TCRα V1 subfamily, a TCRα V2 subfamily, a TCRα V3 subfamily, a TCRα V4, a TCRα V5 subfamily, a TCRα V6 subfamily, a TCRα V7 subfamily, a TCRα V8 subfamily, a TCRα V9 subfamily, a TCRα V10 subfamily, a TCRα V12 subfamily, a TCRα V13 subfamily, a TCRα V14 subfamily, a TCRα V16 subfamily, a TCRα V17 subfamily, a TCRα V18 subfamily, a TCRα V19 subfamily, a TCRα V20 subfamily, a TCRα V21 subfamily, a TCRα V22 subfamily, a TCRα V23 subfamily, a TCRα V24 subfamily, TCRα V25 subfamily, a TCRα V26 subfamily, a TCRα V27 subfamily, a TCRα V29 subfamily, a TCRα V30 subfamily, a TCRα V34 subfamily, a TCRα V35 subfamily, a TCRα V36 subfamily, a TCRα V38 subfamily, a TCRα V39 subfamily, a TCRα V40 subfamily, or a TCRα V41 subfamily, as well as family members of said subfamilies, and variants thereof (e.g., a structural or functional variant thereof).

[0231] In some embodiments, the TCRα V1 subfamily comprises: TCRαV1-1 or TCRαV1-2, or a variant thereof.

[0232] In some embodiments, the TCRα V8 subfamily comprises: TCRαV8-1, TCRαV8-2, TCRαV8-3, TCRαV8-4, or TCRαV8-6, or a variant thereof.

[0233] In some embodiments, the TCRα V9 subfamily comprises: TCRαV9-1 or TCRαV9-2, or a variant thereof.

[0234] In some embodiments, the TCRα V12 subfamily comprises: TCRαV12-1, TCRαV12-2, or TCRαV12-3, or a variant thereof.

[0235] In some embodiments, the TCRα V13 subfamily comprises: TCRαV13-1 or TCRαV13-2, or a variant thereof.

[0236] In some embodiments, the TCRα V14 subfamily comprises: TCRαV14/DV4, or a variant thereof.

[0237] In some embodiments, the TCRα V23 subfamily comprises: TCRαV23/DV6, or a variant thereof.

[0238] In some embodiments, the TCRα V26 subfamily comprises: TCRαV26-1 or TCRαV26-2, or a variant thereof.

[0239] In some embodiments, the TCRα V29 subfamily comprises: TCRαV29/DV5, or a variant thereof.

[0240] In some embodiments, the TCRα V36 subfamily comprises: TCRαV236/DV7, or a variant thereof.

[0241] In some embodiments, the TCRα V38 subfamily comprises: TCRαV38-1 or TCRαV38-2/DV8, or a variant thereof.

[0242] As used herein, the term “T cell receptor beta variable chain” or “TCRβV,” refers to an extracellular region of the T cell receptor beta chain which comprises the antigen recognition domain of the T cell receptor. The term TCRβV includes isoforms, mammalian, e.g., human TCRβV, species homologs of human and analogs comprising at least one common epitope with TCRβV. Human TCRβV comprises a gene family comprising subfamilies including, but not limited to: a TCRβ V6 subfamily, a TCRβ V10 subfamily, a TCRβ V12 subfamily, a TCRβ V5 subfamily, a TCRβ V7 subfamily, a TCRβ V11 subfamily, a TCRβ V14 subfamily, a TCRβ V16 subfamily, a TCRβ V18 subfamily, a TCRβ V9 subfamily, a TCRβ V13 subfamily, a TCRβ V4 subfamily, a TCRβ V3 subfamily, a TCRβ V2 subfamily, a TCRβ V15 subfamily, a TCRβ V30 subfamily, a TCRβ V19 subfamily, a TCRβ V27 subfamily, a TCRβ V28 subfamily, a TCRβ V24 subfamily, a TCRβ V20 subfamily, TCRβ V25 subfamily, a TCRβ V29 subfamily, a TCRβ V1 subfamily, a TCRβ V17 subfamily, a TCRβ V21 subfamily, a TCRβ V23 subfamily, or a TCRβ V26 subfamily, as well as family members of said subfamilies, and variants thereof (e.g., a structural or functional variant thereof). In some embodiments, the TCRβ V6 subfamily comprises: TCRβ V6-4*01, TCRβ V6-4*02, TCRβ V6-9*01, TCRβ V6-8*01, TCRβ V6-5*01, TCRβ V6-6*02, TCRβ V6-6*01, TCRβ V6-2*01, TCRβ V6-3*01 or TCRβ V6-1*01. In some embodiments, TCRβV comprises TCRβ V6-5*01, or a variant thereof, e.g., a variant having 85%, 90%, 95%, 99% or more identity the naturally-occurring sequence. TCRβ V6-5*01 is also known as TRBV65; TCRBV6S5; TCRBV13S1, or TCRβ V13.1. The amino acid sequence of TCRβ V6-5*01, e.g., human TCRβ V6-5*01, is known in that art, e.g., as provided by IMGT ID L36092. In some embodiments, TCRβ V6-5*01 is encoded by the nucleic acid sequence of SEQ ID NO: 43, or a sequence having 85%, 90%, 95%, 99% or more identity thereof. In some embodiments, TCRβ V6-5*01 comprises the amino acid sequence of SEQ ID NO: 44, or a sequence having 85%, 90%, 95%, 99% or more identity thereof.

SEQ ID NO: 43
ATGAGCATCGGCCTCCTGTGCTGTGCAGCCTTGTCTCTCCTGTGG
GCAGGTCCAGTGAATGCTGGTGTCACTCAGACCCCAAAATTCCAG
GTCCTGAAGACAGGACAGAGCATGACACTGCAGTGTGCCCAGGAT
ATGAACCATGAATACATGTCCTGGTATCGACAAGACCCAGGCATG
GGGCTGAGGCTGATTCATTACTCAGTTGGTGCTGGTATCACTGAC
CAAGGAGAAGTCCCCAATGGCTACAATGTCTCCAGATCAACCACA
GAGGATTTCCCGCTCAGGCTGCTGTCGGCTGCTCCCTCCCAGACA
TCTGTGTACTTCTGTGCCAGCAGTTACTC
SEQ ID NO: 44
MSIGLLCCAALSLLWAGPVNAGVTQTPKFQVLKTGQSMTLQCAQD
MNHEYMSWYRQDPGMGLRLIHYSVGAGITDQGEVPNGYNVSRSTT
EDFPLRLLSAAPSQTSVYFCASSY

### TCR Alpha V (TCRαV)

[0243] Diversity in the immune system enables protection against a huge array of pathogens. Since the germline genome is limited in size, diversity is achieved not only by the process of V(D)J recombination but also by junctional (junctions between V-D and D-J segments) deletion of nucleotides and addition of pseudo-random, non-templated nucleotides. The TCR alpha gene undergoes gene arrangement to generate diversity.

[0244] The TCR V alpha repertoire varies between individuals and populations because of, e.g., 7 frequently occurring inactivating polymorphisms in functional gene segments and a large insertion/deletion-related polymorphism encompassing 2 V alpha gene segments.

[0245] Provided herein are, inter alia, antibody molecules and fragments thereof, that bind, e.g., specifically bind, to a human TCR alpha V chain (TCRαV), e.g., a TCRαV gene family (also referred to as a group), e.g., a TCRαV subfamily (also referred to as a subgroup), e.g., as described herein. TCR alpha V families and subfamilies are known in the art, e.g., as described in Yassai et al., (2009) Immunogenetics 61(7)pp:493-502; Wei S. and Concannon P. (1994) Human Immunology 41(3) pp: 201-206. The antibodies described herein can be recombinant antibodies, e.g., recombinant non-murine antibodies, e.g., recombinant human or humanized antibodies.

[0246] The terms TCRAV, TCRVA, TRAV, TCRαV, TCRVα or TRαV are used interchangeably herein and refer to a TCR alpha V chain, e.g., as described herein.

[0247] In some embodiments, provided herein is an anti-TCRαV antibody molecule that binds to human TCRαV, e.g., a TCRαV family, e.g., gene family or a variant thereof.

[0248] Exemplary amino acid sequences for TCRαV subfamily members can be found on the ImMunoGeneTics Information System website: www.imgt.org, or in a similar resource.

### TCR Beta V (TCRβV)

[0249] Diversity in the immune system enables protection against a huge array of pathogens. Since the germline genome is limited in size, diversity is achieved not only by the process of V(D)J recombination but also by junctional (junctions between V-D and D-J segments) deletion of nucleotides and addition of pseudo-random, non-templated nucleotides. The TCR beta gene undergoes gene arrangement to generate diversity.

[0250] The TCR V beta repertoire varies between individuals and populations because of, e.g., 7 frequently occurring inactivating polymorphisms in functional gene segments and a large insertion/deletion-related polymorphism encompassing 2 V beta gene segments.

[0251] Provided herein are, inter alia, antibody molecules and fragments thereof, that bind, e.g., specifically bind, to a human TCR beta V chain (TCRβV), e.g., a TCRβV gene family (also referred to as a group), e.g., a TCRβV subfamily (also referred to as a subgroup), e.g., as described herein. TCR beta V families and subfamilies are known in the art, e.g., as described in Yassai et al., (2009) Immunogenetics 61(7)pp:493-502; Wei S. and Concannon P. (1994) Human Immunology 41(3) pp: 201-206. The antibodies described herein can be recombinant antibodies, e.g., recombinant non-murine antibodies, e.g., recombinant human or humanized antibodies.

[0252] The terms TCRBV, TCRVB, TRBV, TCRβV, TCRVβ or TRβV are used interchangeably herein and refer to a TCR beta V chain, e.g., as described herein.

[0253] In some embodiments, provided herein is an anti-TCRβV antibody molecule that binds to human TCRβV, e.g., a TCRβV family, e.g., gene family or a variant thereof. In some embodiments a TCRBV gene family comprises one or more subfamilies, e.g., as described herein, e.g., in Table 6 or Table 7. In some embodiments, the TCRβV gene family comprises: a TCRβ V6 subfamily, a TCRβ V10 subfamily, a TCRβ V12 subfamily, a TCRβ V5 subfamily, a TCRβ V7 subfamily, a TCRβ VII subfamily, a TCRβ V14 subfamily, a TCRβ V16 subfamily, a TCRβ V18 subfamily, a TCRβ V9 subfamily, a TCRβ V13 subfamily, a TCRβ V4 subfamily, a TCRβ V3 subfamily, a TCRβ V2 subfamily, a TCRβ V15 subfamily, a TCRβ V30 subfamily, a TCRβ V19 subfamily, a TCRβ V27 subfamily, a TCRβ V28 subfamily, a TCRβ V24 subfamily, a TCRβ V20 subfamily, TCRβ V25 subfamily, a TCRβ V29 subfamily, a TCRβ V1 subfamily, a TCRβ V17 subfamily, a TCRβ V21 subfamily, a TCRβ V23 subfamily, or a TCRβ V26 subfamily.

[0254] In some embodiments, TCRβ V6 subfamily is also known as TCRβ V13.1. In some embodiments, the TCRβ V6 subfamily comprises: TCRβ V6-4*01, TCRβ V6-4*02, TCRβ V6-9*01, TCRβ V6-8*01, TCRβ V6-5*01, TCRβ V6-6*02, TCRβ V6-6*01, TCRβ V6-2*01, TCRβ V6-3*01 or TCRβ V6-1*01, or a variant thereof. In some embodiments, TCRβ V6 comprises TCRβ V6-4*01, or a variant thereof. In some embodiments, TCRβ V6 comprises TCRβ V6-4*02, or a variant thereof. In some embodiments, TCRβ V6 comprises TCRβ V6-9*01, or a variant thereof. In some embodiments, TCRβ V6 comprises TCRβ V6-8*01, or a variant thereof. In some embodiments, TCRβ V6 comprises TCRβ V6-5*01, or a variant thereof. In some embodiments, TCRβ V6 comprises TCRβ V6-6*02, or a variant thereof. In some embodiments, TCRβ V6 comprises TCRβ V6-6*01, or a variant thereof. In some embodiments, TCRβ V6 comprises TCRβ V6-2*01, or a variant thereof. In some embodiments, TCRβ V6 comprises TCRβ V6-3*01, or a variant thereof. In some embodiments, TCRβ V6 comprises TCRβ V6-1*01, or a variant thereof.

[0255] In some embodiments, TCRβ V6 comprises TCRβ V6-5*01, or a variant thereof. In some embodiments, TCRβ V6, e.g., TCRβ V6-5*01, is recognized, e.g., bound, by SEQ ID NO: 1 and/or SEQ ID NO: 2. In some embodiments, TCRβ V6, e.g., TCRβ V6-5*01, is recognized, e.g., bound, by SEQ ID NO: 9 and/or SEQ ID NO: 10. In some embodiments, TCRβ V6 is recognized, e.g., bound, by SEQ ID NO: 9 and/or SEQ ID NO: 11.

[0256] In some embodiments, TCRβ V10 subfamily is also known as TCRβ V12. In some embodiments, the TCRβ V10 subfamily comprises: TCRβ V10-1*01, TCRβ V10-1*02, TCRβ V10-3*01 or TCRβ V10-2*01, or a variant thereof.

[0257] In some embodiments, TCRβ V12 subfamily is also known as TCRβ V8.1. In some embodiments, the TCRβ V12 subfamily comprises: TCRβ V12-4*01, TCRβ V12-3*01, or TCRβ V12-5*01, or a variant thereof. In some embodiments, TCRβ V12 is recognized, e.g., bound, by SEQ ID NO: 15 and/or SEQ ID NO: 16. In some embodiments, TCRβ V12 is recognized, e.g., bound, by any one of SEQ ID NOs 23-25, and/or any one of SEQ ID NO: 26-30:

[0258] In some embodiments, the TCRβ V5 subfamily is chosen from: TCRβ V5-5*01, TCRβ V5-6*01, TCRβ V5-4*01, TCRβ V5-8*01, TCRβ V5-1*01, or a variant thereof.

[0259] In some embodiments, the TCRβ V7 subfamily comprises TCRβ V7-7*01, TCRβ V7-6*01, TCRβ V7-8*02, TCRβ V7-4*01, TCRβ V7-2*02, TCRβ V7-2*03, TCRβ V7-2*01, TCRβ V7-3*01, TCRβ V7-9*03, or TCRβ V7-9*01, or a variant thereof.

[0260] In some embodiments, the TCRβ VII subfamily comprises: TCRβ V11-1*01, TCRβ V11-2*01 or TCRβ V11-3*01, or a variant thereof. In some embodiments, the TCRβ V14 subfamily comprises TCRβ V14*01, or a variant thereof. In some embodiments, the TCRβ V16 subfamily comprises TCRβ V16*01, or a variant thereof. In some embodiments, the TCRβ V18 subfamily comprises TCRβ V18*01, or a variant thereof. In some embodiments, the TCRβ V9 subfamily comprises TCRβ V9*01 or TCRβ V9*02, or a variant thereof. In some embodiments, the TCRβ V13 subfamily comprises TCRβ V13*01, or a variant thereof. In some embodiments, the TCRβ V4 subfamily comprises TCRβ V4-2*01, TCRβ V4-3*01, or TCRβ V4-1*01, or a variant thereof. In some embodiments, the TCRβ V3 subfamily comprises TCRβ V3-1*01, or a variant thereof. In some embodiments, the TCRβ V2 subfamily comprises TCRβ V2*01, or a variant thereof. In some embodiments, the TCRβ V15 subfamily comprises TCRβ V15*01, or a variant thereof. In some embodiments, the TCRβ V30 subfamily comprises TCRβ V30*01, or TCRβ V30*02, or a variant thereof. In some embodiments, the TCRβ V19 subfamily comprises TCRβ V19*01, or TCRβ V19*02, or a variant thereof. In some embodiments, the TCRβ V27 subfamily comprises TCRβ V27*01, or a variant thereof. In some embodiments, the TCRβ V28 subfamily comprises TCRβ V28*01, or a variant thereof. In some embodiments, the TCRβ V24 subfamily comprises TCRβ V24-1*01, or a variant thereof. In some embodiments, the TCRβ V20 subfamily comprises TCRβ V20-1*01, or TCRβ V20-1*02, or a variant thereof. In some embodiments, the TCRβ V25 subfamily comprises TCRβ V25-1*01, or a variant thereof. In some embodiments, the TCRβ V29 subfamily comprises TCRβ V29-1*01, or a variant thereof.

[0261] Exemplary amino acid sequences for TCRβV subfamily members can be found on the ImMunoGeneTics Information System website: www.imgt.org, or in a similar resource.

### Treatment of Subjects

[0262] Any of the compositions provided herein may be administered to an individual. “Individual” may be used interchangeably with “subject” or “patient.” An individual may be a mammal, for example a human or animal such as a non-human primate, a rodent, a rabbit, a rat, a mouse, a horse, a donkey, a goat, a cat, a dog, a cow, a pig, or a sheep. In some embodiments, the individual is a human. In some embodiments, the individual is a fetus, an embryo, or a child. In other embodiments, the individual may be another eukaryotic organism, such as a plant. In some embodiments, the compositions provided herein are administered to a cell ex vivo.

[0263] In some embodiments, the compositions provided herein are administered to an individual as a method of treating a disease or disorder. In some embodiments, the individual has a genetic disease, such as any of the diseases described herein. In some embodiments, the individual is at risk of having a disease, such as any of the diseases described herein. In some embodiments, the individual is at increased risk of having a disease or disorder caused by insufficient amount of a protein or insufficient activity of a protein. If an individual is “at an increased risk” of having a disease or disorder caused insufficient amount of a protein or insufficient activity of a protein, the method involves preventative or prophylactic treatment. For example, an individual may be at an increased risk of having such a disease or disorder because of family history of the disease. Typically, individuals at an increased risk of having such a disease or disorder benefit from prophylactic treatment (e.g., by preventing or delaying the onset or progression of the disease or disorder). In some embodiments, a fetus is treated in utero, e.g., by administering the multifunctional or multispecific molecules or the compositions as described herein to the fetus directly or indirectly (e.g., via the mother).

[0264] Suitable routes for administration of the molecules or the compositions as described herein may vary depending on cell type to which delivery of the molecules or the compositions is desired. The molecules or the compositions as described herein may be administered to patients parenterally, for example, by intrathecal injection, intracerebroventricular injection, intraperitoneal injection, intramuscular injection, subcutaneous injection, or intravenous injection.

[0265] In some embodiments, the molecules or the compositions as described herein are administered with one or more agents capable of promoting penetration of the subject the molecules or the compositions as described herein across the blood-brain barrier by any method known in the art. For example, delivery of agents by administration of an adenovirus vector to motor neurons in muscle tissue is described in U.S. Pat. No. 6,632,427, “Adenoviral-vector-mediated gene transfer into medullary motor neurons,” incorporated herein by reference. Delivery of vectors directly to the brain, e.g., the striatum, the thalamus, the hippocampus, or the substantia nigra, is described, e.g., in U.S. Pat. No. 6,756,523, “Adenovirus vectors for the transfer of foreign genes into cells of the central nervous system particularly in brain,” incorporated herein by reference.

[0266] In some embodiments, the molecules or the compositions as described herein are linked or conjugated with agents that provide desirable pharmaceutical or pharmacodynamic properties. In some embodiments, the molecules or the compositions as described herein are coupled to a substance, known in the art to promote penetration or transport across the blood-brain barrier, e.g., an antibody to the transferrin receptor. In some embodiments, the molecules or the compositions as described herein are linked with a viral vector.

[0267] In some embodiments, subjects treated using the methods and compositions are evaluated for improvement in condition using any methods known and described in the art.

[0268] The terms “treat,” “treating”, and “treatment,” and the like are used herein to generally mean obtaining a desired pharmacological and/or physiological effect. The effect may be prophylactic in terms of preventing or partially preventing a disease, symptom or condition thereof and/or may be therapeutic in terms of a partial or complete cure of a disease, condition, symptom or adverse effect attributed to the disease. The term “treatment” as used herein covers any treatment of a disease in a mammal, particularly, a human, and includes: (a) preventing the disease from occurring in a subject which may be predisposed to the disease but has not yet been diagnosed as having it; (b) inhibiting the disease, i.e., arresting its development; or (c) relieving the disease, i.e., mitigating or ameliorating the disease and/or its symptoms or conditions. The term “prophylaxis” is used herein to refer to a measure or measures taken for the prevention or partial prevention of a disease or condition. In some embodiments, the terms “condition,” “disease,” or “disorder,” as used herein, are interchangeable.

[0269] By “treating or preventing a disease or a disorder” is meant ameliorating any of the conditions or signs or symptoms associated with the disorder before or after it has occurred. As compared with an equivalent untreated control, such reduction or degree of prevention is at least 3%, 5%, 10%, 20%, 40%, 50%, 60%, 80%, 90%, 95%, or 100% as measured by any standard technique. A patient who is being treated for a disease or a disorder, is one who a medical practitioner has diagnosed as having such a condition. Diagnosis may be by any suitable means. Diagnosis and monitoring may involve, for example, detecting the presence of pathological cells in a biological sample (e.g., tissue biopsy, blood test, or urine test), detecting the level of a surrogate marker of the disorder in a biological sample, or detecting symptoms associated with the disorder. A patient in whom the development of a disorder is being prevented may or may not have received such a diagnosis. One in the art will understand that these patients may have been subjected to the same standard tests as described above or may have been identified, without examination, as one at high risk due to the presence of one or more risk factors (e.g., family history or genetic predisposition).

### Methods of Treatment

[0270] Described herein, in certain embodiments, is a method of treating a condition or disease in a subject in need therefor comprising administering to the subject a therapeutically effective amount of the antibody molecule, multifunctional molecule, or multispecific molecule as described herein, the nucleic acid molecules as described herein, the vector as described herein, the cell as described herein, the pharmaceutical composition as described herein, or a combination thereof, wherein the administering is effective to treat the condition or disease in the subject. Any condition or disease that is related to TCRαV and/or TCRαV may be subject of the methods of treatment disclosed herein. For example, a condition or disease wherein autoreactive T cells of a subject that expresses a TCRαV and/or a TCRαV can be treated with a CAR-T cell containing a CAR with an anti-TCRαV and/or anti-TCRβV binding domain that binds to the TCRαV and/or TCRβV expressed by autoreactive T cells. Examples of TCRαV- and TCRβV-related diseases include, but are not limited to, those listed in Table 5.

[0271] In some embodiments, the condition or disease is an autoimmune disease. In some embodiments, the autoimmune disease is selected from the group consisting of the autoimmune disease is selected from amyotrophic lateral sclerosis (ALS), coeliac disease (CD), ankylosing spondylitis (AS), Covid-induced multisystem inflammatory syndrome in children (MIS-C), primary Sjogren's syndrome (PSS), Churg-Strauss syndrome, sarcoidosis, systemic lupus erythematosus (SLE), type 1 diabetes, autoimmune hepatitis (e.g., type 1 or type 2), primary sclerosing cholangitis, primary biliary cirrhosis, multiple sclerosis, Guillain-Barre syndrome and the AMAN (axonal & neuronal neuropathy), chronic inflammatory demyelinating polyneuropathy (CIDP), transverse myelitis, Tolosa-Hunt syndrome (THS), Devic's disease (neuromyelitis optica), paraneoplastic cerebellardegeneration (PCD), Lambert-Eaton syndrome, psoriasis, scleroderma, CREST (calcinosis,Raynaud phenomenon, esophageal dysmotility, sclerodactyly, and telangiectasia) syndrome,dermatitis herpetiformis, dermatomyositis, bullous pemphigoid, cicatricial pemphigoid/benignmucosal pemphigoid, pemphigoid gestationis, rheumatoid arthritis (RA), psoriatic arthritis, relapsing polychondritis, chronic recurrent multifocal osteomyelitis (CRMO), vasculitis, Kawasaki disease, granulomatosis with polyangiitis (GPA), Behcet's disease (vasculitis),Takayasu's arteritis, polyarteritis nodosa, microscopic polyangiitis (MPA), leukocytoclasticvasculitis, Cogan's syndrome, uveitis, peripheral uveitis (Pars planitis), scleritis, autoimmuneinner ear disease (AIED), Crohn's, ulcerative colitis (UC), Dressler's syndrome, Rheumaticfever, Evans syndrome, paroxysmal nocturnal hemoglobinuria (PNH), hemolytic anemia, thrombocytopenic purpura (TTP), polymyositis, juvenile myositis (JM), including Juvenile Dermatomyositis (JDM) and Juvenile Polymyositis (JPM), ocular cicatricial pemphigoid, or Hashimoto's thyroiditis.

[0272] In some embodiments, the molecules or the composition disclosed herein (e.g., antibody molecules or multispecific molecules (or pharmaceutical composition) provided herein, the nucleic acid molecules as described herein, the vector as described herein, the cell as described herein, the pharmaceutical composition as described herein, or a combination thereof), are administered in a manner appropriate to the disease to be treated or prevented. The quantity and frequency of administration will be determined by such factors as the condition of the patient, and the type and severity of the patient's disease. Appropriate dosages may be determined by clinical trials. For example, when “an effective amount” or “a therapeutic amount” is indicated, the precise amount of the molecules or the composition disclosed herein to be administered can be determined by a physician with consideration of individual differences in severity/character of immune disorder, extent of infection or metastasis, age, weight, and condition of the subject.

[0273] In some embodiments, binding of the molecules or the composition disclosed herein results in cell killing, e.g., target cell killing, e.g. autoreactive T cell killing. In some embodiments, the autoreactive T cell is a CD4+ T cell. In some embodiments, the autoreactive T cell is a CD8+ T cell. In some embodiments, binding of the molecules or the composition disclosed herein results in cell killing in vitro or in vivo.

[0274] In embodiments, the molecules or the composition disclosed herein is administered to the subject parenterally. In embodiments, the cells disclosed herein are administered to the subject intravenously, subcutaneously, intranodally, intramuscularly, intradermally, or intraperitoneally. In embodiments, the cells are administered as an infusion (e.g., as described in Rosenberg et al., New Eng. J. of Med. 319:1676, 1988) or an intravenous push. In embodiments, the cells are administered as an injectable depot formulation.

[0275] In embodiments, the subject is a mammal. In embodiments, the subject is a human, monkey, pig, dog, cat, cow, sheep, goat, rabbit, rat, or mouse. In embodiments, the subject is a human. In embodiments, the subject is a pediatric subject, e.g., less than 18 years of age, e.g., less than 17, 16, 15, 14, 13, 12, 11, 10, 9, 8, 7, 6, 5, 4, 3, 2, 1 or less years of age. In embodiments, the subject is an adult, e.g., at least 18 years of age, e.g., at least 19, 20, 21, 22, 23, 24, 25, 25-30, 30-35, 35-40, 40-50, 50-60, 60-70, 70-80, or 80-90 years of age.

[0276] Without wishing to be bound by any particular theory, the immune response elicited by the anti-TCRVα and/or anti-TCRβV TCR targeting molecules may be an active or a passive immune response. In one embodiment, the anti-TCRVα and/or anti-TCRβV TCR targeting molecules of the present disclosure may be a type of vaccine for ex vivo immunization and/or in vivo therapy in a mammal. With respect to ex vivo immunization, at least one of the following occurs in vitro prior to administering the cell into a mammal: i) expansion of the cells, ii) introducing a nucleic acid encoding an anti-TCRVα and/or anti-TCRβV TCR targeting molecules to the cells or iii) cryopreservation of the cells.

[0277] Ex vivo procedures are well known in the art and are discussed more fully below. Briefly, cells are isolated from a mammal (e.g., a human) and genetically modified (i.e., transduced or transfected in vitro) with a vector expressing an anti-TCRVα and/or anti-TCRβV TCR targeting molecule disclosed herein.

[0278] Methods described herein include treating an autoimmune disease in a subject by using the molecules or the composition disclosed herein, e.g., using a pharmaceutical composition described herein. Also provided are methods for reducing or ameliorating a symptom of an autoimmune disease in a subject. In some embodiments, the methods described herein re-balance a T cell repertoire in a subject (e.g. reduce or deplete autoreactive T cells and preserve healthy T cells to establish a T cell repertoire more similar to a person without an autoimmune disease).

[0279] Disclosed herein are methods of reducing a symptom of an autoimmune disease in a subject in need thereof, comprising administering to the subject a therapeutically effective amount of an agent comprising a moiety that binds to a TCR variable region (e.g. a TCRVα and/or TCRβV region) to the subject, thereby inhibiting or preventing the activation or expansion of autoreactive T cells in the subject. In some embodiments, the agent comprises an anti-TCRαV antibody comprising a variant Fc region. In some embodiments, the agent comprises an anti-TCRβV antibody comprising a variant Fc region. In some embodiments, the variant Fc region has increased binding to C1q complement. In some embodiments, the variant Fc region has increased effector function (e.g., increased antibody dependent cell-mediated cytotoxicity (ADCC), antibody-dependent cellular phagocytosis (ADCP) and/or complement dependent cytotoxicity (CDC).

[0280] Disclosed herein are methods of treating a disease or condition in a subject in need thereof, comprising administering to the subject a therapeutically effective amount of an agent comprising a moiety that binds to a TCR variable region (e.g. a TCRVα and/or TCRβV region) to the subject, thereby inhibiting or preventing the activation or expansion of autoreactive T cells in the subject. In some embodiments, the agent comprises an anti-TCRαV antibody comprising a variant Fc region. In some embodiments, the agent comprises an anti-TCRβV antibody comprising a variant Fc region. In some embodiments, the variant Fc region has increased binding to C1q complement. In some embodiments, the variant Fc region has increased effector function (e.g., increased antibody dependent cell-mediated cytotoxicity (ADCC), antibody-dependent cellular phagocytosis (ADCP) and/or complement dependent cytotoxicity (CDC). In some embodiments, the disease or condition is an autoimmune disease.

[0281] Disclosed herein are methods of reducing a symptom of an autoimmune disease in a subject in need thereof, comprising administering to the subject a therapeutically effective amount of an agent comprising a moiety that binds to a TCR variable region (e.g. a TCRVα and/or TCRβV region) to the subject. In some embodiments, the agent comprises an antibody-drug conjugate. In some embodiments, the antibody-drug conjugate comprises a TCRαV antigen binding domain. In some embodiments, the antibody-drug conjugate comprises a TCRαV antigen binding domain. In some embodiments, the antibody-drug conjugate has no mutation to an Fc region. In some embodiments, the antibody-drug conjugate is functionally linked to a cytotoxic agent. In some embodiments, the cytotoxic agent is an inhibitor of tubulin polymerization. In some embodiments, the cytotoxic agent is selected from the group consisting of maytansine, dolastatin, auristatin drug analogs, duocarmycin derivatives (e.g. CC-1065 analogs and duocarmycin), esperamicin, calicheamicin, and pyrrolobenzodiazepine (PBD).

[0282] Disclosed herein are methods of treating a disease or condition in a subject in need thereof, comprising administering to the subject a therapeutically effective amount of an agent comprising a moiety that binds to a TCR variable region (e.g. a TCRVα and/or TCRβV region) to the subject. In some embodiments, the agent comprises an antibody-drug conjugate. In some embodiments, the antibody-drug conjugate comprises a TCRαV antigen binding domain. In some embodiments, the antibody-drug conjugate comprises a TCRβV antigen binding domain. In some embodiments, the antibody-drug conjugate has no mutation to an Fc region. In some embodiments, the antibody-drug conjugate is functionally linked to a cytotoxic agent. In some embodiments, the cytotoxic agent is an inhibitor of tubulin polymerization. In some embodiments, the cytotoxic agent is selected from the group consisting of maytansine, dolastatin, auristatin drug analogs, duocarmycin derivatives (e.g. CC-1065 analogs and duocarmycin), esperamicin, calicheamicin, and pyrrolobenzodiazepine (PBD). In some embodiments, the disease or condition is an autoimmune disease.

[0283] Disclosed herein are methods of reducing a symptom of an autoimmune disease in a subject in need thereof, comprising administering to the subject a therapeutically effective amount of an agent comprising a moiety that binds to a TCR variable region (e.g. a TCRVα and/or TCRβV region) to the subject. In some embodiments, the agent is a CAR T cell comprising a CAR with an anti-TCRαV binding domain that binds to the TCRαV expressed by the autoreactive T cells. In some embodiments, the agent is a CAR T cell comprising a CAR with an anti-TCRβV binding domain that binds to the TCRβV expressed by the autoreactive T cells. In some embodiments, the CAR comprises a transmembrane domain as provided herein. In some embodiments, the CAR comprises an intracellular domain as provided herein.

[0284] Disclosed herein are methods of treating a disease or condition in a subject in need thereof, comprising administering to the subject a therapeutically effective amount of an agent comprising a moiety that binds to a TCR variable region (e.g. a TCRVα and/or TCRβV region) to the subject. In some embodiments, the agent is a CAR T cell comprising a CAR with an anti-TCRαV binding domain that binds to the TCRαV expressed by the autoreactive T cells. In some embodiments, the agent is a CAR T cell comprising a CAR with an anti-TCRβV binding domain that binds to the TCRβV expressed by the autoreactive T cells. In some embodiments, the CAR comprises a transmembrane domain as provided herein. In some embodiments, the CAR comprises an intracellular domain as provided herein. In some embodiments, the disease or condition is an autoimmune disease.

[0285] Disclosed herein are methods of reducing a symptom of an autoimmune disease in a subject in need thereof, comprising administering to the subject a therapeutically effective amount of an agent comprising a moiety that binds to a TCR variable region (e.g. a TCRVα and/or TCRβV region) to the subject. In some embodiments, the subject is administered a multispecific molecule comprising a TCRVα binding region and a NK cell engager. In some embodiments, the NK cell engager is selected from an antigen binding domain or ligand that binds to (e.g., activates): NKp30, NKp40, NKp44, NKp46, NKG2D, DNAM1, DAP10, CD16 (e.g., CD16a, CD16b, or both), CRTAM, CD27, PSGL1, CD96, CD100 (SEMA4D), NKp80, CD244 (also known as SLAMF4 or 2B4), SLAMF6, SLAMF7, KIR2DS2, KIR2DS4, KIR3DS1, KIR2DS3, KIR2DS5, KIR2DS1, CD94, NKG2C, NKG2E, or CD160. In some embodiments, the NK cell engager is a ligand of CD16, which is a CD16a/b ligand, e.g., a CD16a/b ligand further comprising an antibody Fc region. In some embodiments, the NK cell engager is an agonist for a NK activating receptor. In some embodiments, the NK cell engager is an antagonist for a NK inhibitory receptor. In some embodiments, the multispecific molecule has no Fc region mutation.

[0286] Disclosed herein are methods of treating a disease or condition in a subject in need thereof, comprising administering to the subject a therapeutically effective amount of an agent comprising a moiety that binds to a TCR variable region (e.g. a TCRVα and/or TCRβV region) to the subject. In some embodiments, the subject is administered a multispecific molecule comprising a TCRVα binding region and a NK cell engager. In some embodiments, the NK cell engager is selected from an antigen binding domain or ligand that binds to (e.g., activates): NKp30, NKp40, NKp44, NKp46, NKG2D, DNAM1, DAP10, CD16 (e.g., CD16a, CD16b, or both), CRTAM, CD27, PSGL1, CD96, CD100 (SEMA4D), NKp80, CD244 (also known as SLAMF4 or 2B4), SLAMF6, SLAMF7, KIR2DS2, KIR2DS4, KIR3DS1, KIR2DS3, KIR2DS5, KIR2DS1, CD94, NKG2C, NKG2E, or CD160. In some embodiments, the NK cell engager is a ligand of CD16, which is a CD16a/b ligand, e.g., a CD16a/b ligand further comprising an antibody Fc region. In some embodiments, the NK cell engager is an agonist for a NK activating receptor. In some embodiments, the NK cell engager is an antagonist for a NK inhibitory receptor. In some embodiments, the multispecific molecule has no Fc region mutation. In some embodiments, the subject has an autoimmune disease.

[0287] Disclosed herein are methods of reducing a symptom of an autoimmune disease in a subject in need thereof, comprising administering to the subject a therapeutically effective amount of an agent comprising a moiety that binds to a TCR variable region (e.g. a TCRVα and/or TCRβV region) to the subject. In some embodiments, the subject is administered an agent comprising a multispecific molecule comprising an antigen binding domain that binds to TCRVα and a T cell engager. In some embodiments, the subject is administered an agent comprising a multispecific molecule comprising an antigen binding domain that binds to TCRVβ and a T cell engager. In some embodiments, the T cell engager is selected from an antigen binding domain or ligand that binds to (e.g., and in some embodiments activates) one or more of CD3, TCRα, TCRβ, TCRγ, TCRζ, ICOS, CD28, CD27, HVEM, LIGHT, CD40, 4-1BB, OX40, DR3, GITR, CD30, TIM1, SLAM, CD2, or CD226. In some embodiments, the T cell engager binds to (e.g. activates) a CD4+ and/or a CD8+ T cell. In some embodiments, the T cell engager binds to (e.g. activates) a CD4+ T cell. In some embodiments, the T cell engager binds to (e.g. activates) a CD8+ T cell. In some embodiments, the disease or condition is an autoimmune disease.

[0288] Also described herein are methods of treating a subject having an autoimmune disease, comprising: acquiring a status of one or more TCRαV and/or TCRβV molecules in a sample from the subject, and determining the one or more TCRαV and/or TCRβV molecules is expressed in the autoreactive T cell population, in a sample from the subject, wherein responsive to said determination, administering to the subject an effective amount of an anti-TCRαV antibody molecule and/or anti-TCRβV antibody molecule, e.g., an agonistic anti-TCRαV antibody and/or an agonistic anti-TCRβV antibody molecule, e.g., as described herein.

[0289] In some embodiments, acquiring a value for the status, e.g., presence, level and/or activity, of one or more TCRαV and/or TCRβV molecules comprises acquiring a measure of the T cell receptor (TCR) repertoire of a sample. In some embodiments, the value comprises a measure of the clonotype of a population of T cells in the sample.

[0290] In some embodiments, a value for the status of one or more TCRαV and/or TCRβV molecules is obtained, e.g., measured, using an assay described in Wang C Y, et al., Int J Oncol. (2016) 48(6):2247-56, the entire contents of which are hereby incorporated by reference.

[0291] In some embodiments, a value for the status of one or more TCRαV and/or TCRβV molecules is obtained, e.g., measured, using flow cytometry.

[0292] In some embodiments, the subject is administered the multifunctional polypeptide molecule as described herein comprising an anti-TCRαV and/or anti-TCRβV binding moiety.

[0293] In some embodiments, provided herein is a method of treating a subject that suffers from amyotrophic lateral sclerosis (ALS) by administering to the subject a TCR targeting molecule disclosed herein that specifically binds to a TCRβV7 subfamily molecule, a nucleic acid molecule encoding the TCR targeting molecule, or a cell that expresses the TCR targeting molecule (e.g., a CAR-T cell disclosed herein). In some embodiments, the TCRβV7 subfamily molecule comprises a TCRβV7-1 molecule. In some embodiments, provided herein is a method of treating a subject that suffers from amyotrophic lateral sclerosis (ALS) by administering to the subject a TCR targeting molecule disclosed herein that specifically binds to a TCRβV23 subfamily molecule, a nucleic acid molecule encoding the TCR targeting molecule, or a cell that expresses the TCR targeting molecule (e.g., a CAR-T cell disclosed herein).

[0294] In some embodiments, provided herein is a method of treating a subject that suffers from Celiac disease by administering to the subject a TCR targeting molecule disclosed herein that specifically binds to a TCRβV4 subfamily molecule, a nucleic acid molecule encoding the TCR targeting molecule, or a cell that expresses the TCR targeting molecule (e.g., a CAR-T cell disclosed herein). In some embodiments, provided herein is a method of treating a subject that suffers from Celiac disease by administering to the subject a TCR targeting molecule disclosed herein that specifically binds to a TCRβV7 subfamily molecule, a nucleic acid molecule encoding the TCR targeting molecule, or a cell that expresses the TCR targeting molecule (e.g., a CAR-T cell disclosed herein). In some embodiments, provided herein is a method of treating a subject that suffers from Celiac disease by administering to the subject a TCR targeting molecule disclosed herein that specifically binds to a TCRαV4 subfamily molecule, a nucleic acid molecule encoding the TCR targeting molecule, or a cell that expresses the TCR targeting molecule (e.g., a CAR-T cell disclosed herein). In some embodiments, provided herein is a method of treating a subject that suffers from Celiac disease by administering to the subject a TCR targeting molecule disclosed herein that specifically binds to a TCRαV26 subfamily molecule, a nucleic acid molecule encoding the TCR targeting molecule, or a cell that expresses the TCR targeting molecule (e.g., a CAR-T cell disclosed herein).

[0295] In some embodiments, provided herein is a method of treating a subject that suffers from ankylosing spondylitis by administering to the subject a TCR targeting molecule disclosed herein that specifically binds to a TCRβV9 subfamily molecule, a nucleic acid molecule encoding the TCR targeting molecule, or a cell that expresses the TCR targeting molecule (e.g., a CAR-T cell disclosed herein). In some embodiments, provided herein is a method of treating a subject that suffers from ankylosing spondylitis by administering to the subject a TCR targeting molecule disclosed herein that specifically binds to a TCRαV21 subfamily molecule, a nucleic acid molecule encoding the TCR targeting molecule, or a cell that expresses the TCR targeting molecule (e.g., a CAR-T cell disclosed herein). In some embodiments, provided herein is a method of treating a subject that suffers from Covid-induced multisystem inflammatory syndrome in children (MIS-C) by administering to the subject a TCR targeting molecule disclosed herein that specifically binds to a TCRβV11 subfamily molecule, a nucleic acid molecule encoding the TCR targeting molecule, or a cell that expresses the TCR targeting molecule (e.g., a CAR-T cell disclosed herein). In some embodiments, the TCRβV11 subfamily molecule comprises a TCRβV11-2 molecule. In some embodiments, provided herein is a method of treating a subject that suffers from primary Sjogren's syndrome by administering to the subject a TCR targeting molecule disclosed herein that specifically binds to a TCRβV6 subfamily molecule, a nucleic acid molecule encoding the TCR targeting molecule, or a cell that expresses the TCR targeting molecule (e.g., a CAR-T cell disclosed herein). In some embodiments, the TCRβV6 subfamily molecule comprises a TCRβV6-1 molecule, a TCRβV6-2/3 molecule, or a TCRβV6-5 molecule.

[0296] In some embodiments, provided herein is a method of treating a subject that suffers from multiple sclerosis by administering to the subject a TCR targeting molecule disclosed herein that specifically binds to a TCRβV20 subfamily molecule, a nucleic acid molecule encoding the TCR targeting molecule, or a cell that expresses the TCR targeting molecule (e.g., a CAR-T cell disclosed herein). In some embodiments, the TCRβV20 subfamily molecule is a TCRβV20-1 molecule. In some embodiments, provided herein is a method of treating a subject that suffers from multiple sclerosis by administering to the subject a TCR targeting molecule disclosed herein that specifically binds to a TCRβV29 subfamily molecule, a nucleic acid molecule encoding the TCR targeting molecule, or a cell that expresses the TCR targeting molecule (e.g., a CAR-T cell disclosed herein). In some embodiments, the TCRβV20 subfamily molecule is a TCRβV29-1 molecule. In some embodiments, provided herein is a method of treating a subject that suffers from multiple sclerosis by administering to the subject a TCR targeting molecule disclosed herein that specifically binds to a TCRβV7 subfamily molecule, a nucleic acid molecule encoding the TCR targeting molecule, or a cell that expresses the TCR targeting molecule (e.g., a CAR-T cell disclosed herein). In some embodiments, the TCRβV7 subfamily molecule is a TCRβV7-8/9 molecule. In some embodiments, provided herein is a method of treating a subject that suffers from multiple sclerosis by administering to the subject a TCR targeting molecule disclosed herein that specifically binds to a TCRβV10 subfamily molecule, a nucleic acid molecule encoding the TCR targeting molecule, or a cell that expresses the TCR targeting molecule (e.g., a CAR-T cell disclosed herein). In some embodiments, the TCRβV10 subfamily molecule is a TCRβV10-3 molecule.

[0297] In some embodiments, provided herein is a method of treating a subject that suffers from type I diabetes by administering to the subject a TCR targeting molecule disclosed herein that specifically binds to a TCRβV12 subfamily molecule, a nucleic acid molecule encoding the TCR targeting molecule, or a cell that expresses the TCR targeting molecule (e.g., a CAR-T cell disclosed herein). In some embodiments, the TCRβV12 subfamily molecule comprises a TCRβV12-3/4 molecule. In some embodiments, provided herein is a method of treating a subject that suffers from type I diabetes by administering to the subject a TCR targeting molecule disclosed herein that specifically binds to a TCRαV12 subfamily molecule, a nucleic acid molecule encoding the TCR targeting molecule, or a cell that expresses the TCR targeting molecule (e.g., a CAR-T cell disclosed herein). In some embodiments, the TCRαV12 subfamily molecule comprises a TCRαV12-3 molecule.

[0298] In some embodiments, a subject has amyotrophic lateral sclerosis. In some embodiments, the subject having amyotrophic lateral sclerosis has a population of autoreactive T cells that express a TCRβV7 subfamily comprising TCRβV7-1. In some embodiments, the subject is administered the agent, antibody molecule, multispecific molecule, and/or multifunctional molecule as described herein comprising an anti-TCRβV molecule that binds to one or more members of the TCRβV7 subfamily. In some embodiments, administration of the agent, antibody molecule, multispecific molecule, and/or multifunctional molecule as described herein results in inhibiting or preventing the activation and/or expansion of the population of autoreactive T cells expressing one or more members of the TCRβV7 subfamily. In some embodiments, administration of the agent, antibody molecule, multispecific molecule, and/or multifunctional molecule as described herein results in reducing or depleting the population of autoreactive T cells expressing one or more members of the TCRβV7 subfamily. In some embodiments, the subject having amyotrophic lateral sclerosis has a population of autoreactive T cells that express a TCRβV23 subfamily. In some embodiments, the subject is administered the agent, antibody molecule, multispecific molecule, and/or multifunctional molecule as described herein comprising an anti-TCRβV molecule that binds to one or more members of the TCRβV23 subfamily. In some embodiments, administration of the agent, antibody molecule, multispecific molecule, and/or multifunctional molecule as described herein results in inhibiting or preventing the activation and/or expansion of the population of autoreactive T cells expressing one or more members of the TCRβV23 subfamily. In some embodiments, administration of the agent, antibody molecule, multispecific molecule, and/or multifunctional molecule as described herein results in reducing or depleting the population of autoreactive T cells expressing one or more members of the TCRβV23 subfamily.

[0299] In some embodiments, a subject has Celiac disease. In some embodiments, the subject having Celiac disease has a population of autoreactive T cells that express a TCRβV4 subfamily. In some embodiments, the subject is administered the agent, antibody molecule, multispecific molecule, and/or multifunctional molecule as described herein comprising an anti-TCRβV molecule that binds to one or more members of the TCRβV4 subfamily. In some embodiments, administration of the agent, antibody molecule, multispecific molecule, and/or multifunctional molecule as described herein results in inhibiting or preventing the activation and/or expansion of the population of autoreactive T cells expressing one or more members of the TCRβV4 subfamily. In some embodiments, administration of the agent, antibody molecule, multispecific molecule, and/or multifunctional molecule as described herein results in reducing or depleting the population of autoreactive T cells expressing one or more members of the TCRβV4 subfamily. In some embodiments, the subject having Celiac disease has a population of autoreactive T cells that express a TCRβV7 subfamily. In some embodiments, the subject is administered the agent, antibody molecule, multispecific molecule, and/or multifunctional molecule as described herein comprising an anti-TCRβV molecule that binds to one or more members of the TCRβV7 subfamily. In some embodiments, administration of the agent, antibody molecule, multispecific molecule, and/or multifunctional molecule as described herein results in inhibiting or preventing the activation and/or expansion of the population of autoreactive T cells expressing one or more members of the TCRβV7 subfamily. In some embodiments, administration of the agent, antibody molecule, multispecific molecule, and/or multifunctional molecule as described herein results in reducing or depleting the population of autoreactive T cells expressing one or more members of the TCRβV7 subfamily. In some embodiments, the subject having Celiac disease has a population of autoreactive T cells that express a TCRαV4 subfamily. In some embodiments, the subject is administered the agent, antibody molecule, multispecific molecule, and/or multifunctional molecule as described herein comprising an anti-TCRαV molecule that binds to one or more members of the TCRαV4 subfamily. In some embodiments, administration of the agent, antibody molecule, multispecific molecule, and/or multifunctional molecule as described herein results in inhibiting or preventing the activation and/or expansion of the population of autoreactive T cells expressing one or more members of the TCRαV4 subfamily. In some embodiments, administration of the agent, antibody molecule, multispecific molecule, and/or multifunctional molecule as described herein results in reducing or depleting the population of autoreactive T cells expressing one or more members of the TCRαV4 subfamily. In some embodiments, the subject having Celiac disease has a population of autoreactive T cells that express a TCRαV26 subfamily. In some embodiments, the subject is administered the agent, antibody molecule, multispecific molecule, and/or multifunctional molecule as described herein comprising an anti-TCRαV molecule that binds to one or more members of the TCRαV26 subfamily. In some embodiments, administration of the agent, antibody molecule, multispecific molecule, and/or multifunctional molecule as described herein results in inhibiting or preventing the activation and/or expansion of the population of autoreactive T cells expressing one or more members of the TCRαV26 subfamily. In some embodiments, administration of the agent, antibody molecule, multispecific molecule, and/or multifunctional molecule as described herein results in reducing or depleting the population of autoreactive T cells expressing one or more members of the TCRαV26 subfamily.

[0300] In some embodiments, a subject has ankylosing spondylitis. In some embodiments, the subject having ankylosing spondylitis has a population of autoreactive T cells that express a TCRβV9 subfamily. In some embodiments, the subject is administered the agent, antibody molecule, multispecific molecule, and/or multifunctional molecule as described herein comprising an anti-TCRβV molecule that binds to one or more members of the TCRβV9 subfamily. In some embodiments, administration of the agent, antibody molecule, multispecific molecule, and/or multifunctional molecule as described herein results in inhibiting or preventing the activation and/or expansion of the population of autoreactive T cells expressing one or more members of the TCRβV9 subfamily. In some embodiments, administration of the agent, antibody molecule, multispecific molecule, and/or multifunctional molecule as described herein results in reducing or depleting the population of autoreactive T cells expressing one or more members of the TCRβV9 subfamily. In some embodiments, the subject having ankylosing spondylitis has a population of autoreactive T cells that express a TCRαV21 subfamily. In some embodiments, the subject is administered the agent, antibody molecule, multispecific molecule, and/or multifunctional molecule as described herein comprising an anti-TCRαV molecule that binds to one or more members of the TCRαV21 subfamily. In some embodiments, administration of the agent, antibody molecule, multispecific molecule, and/or multifunctional molecule as described herein results in inhibiting or preventing the activation and/or expansion of the population of autoreactive T cells expressing one or more members of the TCRαV21 subfamily. In some embodiments, administration of the agent, antibody molecule, multispecific molecule, and/or multifunctional molecule as described herein results in reducing or depleting the population of autoreactive T cells expressing one or more members of the TCRαV21 subfamily.

[0301] In some embodiments, a subject has Covid-induced multisystem inflammatory syndrome in children (MIS-C). In some embodiments, the subject having MIS-C has a population of autoreactive T cells that express a TCRβV11 subfamily comprising TCRβV11-2. In some embodiments, the subject is administered the agent, antibody molecule, multispecific molecule, and/or multifunctional molecule as described herein comprising an anti-TCRβV molecule that binds to one or more members of the TCRβV11 subfamily. In some embodiments, administration of the agent, antibody molecule, multispecific molecule, and/or multifunctional molecule as described herein results in inhibiting or preventing the activation and/or expansion of the population of autoreactive T cells expressing one or more members of the TCRβV11 subfamily. In some embodiments, administration of the agent, antibody molecule, multispecific molecule, and/or multifunctional molecule as described herein results in reducing or depleting the population of autoreactive T cells expressing one or more members of the TCRβV11 subfamily.

[0302] In some embodiments, a subject has primary Sjogren's syndrome. In some embodiments, the subject having primary Sjogren's syndrome has a population of autoreactive T cells that express a TCRβV6 subfamily comprising TCRβV6-1, TCRβV6-2/3, or TCRβV6-5. In some embodiments, the subject is administered the agent, antibody molecule, multispecific molecule, and/or multifunctional molecule as described herein comprising an anti-TCRβV molecule that binds to one or more members of the TCRβV6 subfamily. In some embodiments, administration of the agent, antibody molecule, multispecific molecule, and/or multifunctional molecule as described herein results in inhibiting or preventing the activation and/or expansion of the population of autoreactive T cells expressing one or more members of the TCRβV6 subfamily. In some embodiments, administration of the agent, antibody molecule, multispecific molecule, and/or multifunctional molecule as described herein results in reducing or depleting the population of autoreactive T cells expressing one or more members of the TCRβV6 subfamily.

[0303] In some embodiments, a subject has multiple sclerosis. In some embodiments, the subject having multiple sclerosis has a population of autoreactive T cells that express a TCRβV20 subfamily comprising TCRβV20-1. In some embodiments, the subject is administered the agent, antibody molecule, multispecific molecule, and/or multifunctional molecule as described herein comprising an anti-TCRβV molecule that binds to one or more members of the TCRβV20 subfamily. In some embodiments, administration of the agent, antibody molecule, multispecific molecule, and/or multifunctional molecule as described herein results in inhibiting or preventing the activation and/or expansion of the population of autoreactive T cells expressing one or more members of the TCRβV20 subfamily. In some embodiments, administration of the agent, antibody molecule, multispecific molecule, and/or multifunctional molecule as described herein results in reducing or depleting the population of autoreactive T cells expressing one or more members of the TCRβV20 subfamily. In some embodiments, the subject having multiple sclerosis has a population of autoreactive T cells that express a TCRβV29 subfamily comprising TCRβV29-1. In some embodiments, the subject is administered the agent, antibody molecule, multispecific molecule, and/or multifunctional molecule as described herein comprising an anti-TCRβV molecule that binds to one or more members of the TCRβV29 subfamily. In some embodiments, administration of the agent, antibody molecule, multispecific molecule, and/or multifunctional molecule as described herein results in inhibiting or preventing the activation and/or expansion of the population of autoreactive T cells expressing one or more members of the TCRβV29 subfamily. In some embodiments, administration of the agent, antibody molecule, multispecific molecule, and/or multifunctional molecule as described herein results in reducing or depleting the population of autoreactive T cells expressing one or more members of the TCRβV29 subfamily. In some embodiments, the subject having multiple sclerosis has a population of autoreactive T cells that express a TCRβV7 subfamily comprising TCRβV7-8/9. In some embodiments, the subject is administered the agent, antibody molecule, multispecific molecule, and/or multifunctional molecule as described herein comprising an anti-TCRβV molecule that binds to one or more members of the TCRβV7 subfamily. In some embodiments, administration of the agent, antibody molecule, multispecific molecule, and/or multifunctional molecule as described herein results in inhibiting or preventing the activation and/or expansion of the population of autoreactive T cells expressing one or more members of the TCRβV7 subfamily. In some embodiments, administration of the agent, antibody molecule, multispecific molecule, and/or multifunctional molecule as described herein results in reducing or depleting the population of autoreactive T cells expressing one or more members of the TCRβV7 subfamily. In some embodiments, the subject having multiple sclerosis has a population of autoreactive T cells that express a TCRβV10 subfamily comprising TCRβV10-3. In some embodiments, the subject is administered the agent, antibody molecule, multispecific molecule, and/or multifunctional molecule as described herein comprising an anti-TCRαV molecule that binds to one or more members of the TCRβV10 subfamily. In some embodiments, administration of the agent, antibody molecule, multispecific molecule, and/or multifunctional molecule as described herein results in inhibiting or preventing the activation and/or expansion of the population of autoreactive T cells expressing one or more members of the TCRβV10 subfamily. In some embodiments, administration of the agent, antibody molecule, multispecific molecule, and/or multifunctional molecule as described herein results in reducing or depleting the population of autoreactive T cells expressing one or more members of the TCRβV10 subfamily.

[0304] In some embodiments, a subject has type I diabetes. In some embodiments, the subject having type I diabetes has a population of autoreactive T cells that express a TCRβV12 subfamily comprising TCRβV12-3/4. In some embodiments, the subject is administered the agent, antibody molecule, multispecific molecule, and/or multifunctional molecule as described herein comprising an anti-TCRβV molecule that binds to one or more members of the TCRβV12 subfamily. In some embodiments, administration of the agent, antibody molecule, multispecific molecule, and/or multifunctional molecule as described herein results in inhibiting or preventing the activation and/or expansion of the population of autoreactive T cells expressing one or more members of the TCRβV12 subfamily. In some embodiments, administration of the agent, antibody molecule, multispecific molecule, and/or multifunctional molecule as described herein results in reducing or depleting the population of autoreactive T cells expressing one or more members of the TCRβV12 subfamily. In some embodiments, the subject having type I diabetes has a population of autoreactive T cells that express a TCRαV12 subfamily comprising TCRαV12-3. In some embodiments, the subject is administered the agent, antibody molecule, multispecific molecule, and/or multifunctional molecule as described herein comprising an anti-TCRαV molecule that binds to one or more members of the TCRαV12 subfamily. In some embodiments, administration of the agent, antibody molecule, multispecific molecule, and/or multifunctional molecule as described herein results in inhibiting or preventing the activation and/or expansion of the population of autoreactive T cells expressing one or more members of the TCRαV12 subfamily. In some embodiments, administration of the agent, antibody molecule, multispecific molecule, and/or multifunctional molecule as described herein results in reducing or depleting the population of autoreactive T cells expressing one or more members of the TCRαV12 subfamily.

[0305] In some aspects, the present disclosure provides methods for depleting or reducing T cells in a subject in need thereof. In some embodiments, the T cells are autoreactive T cells. In some embodiments, the autoreactive T cells target autologous T cells of the subject. In some embodiments, the autoreactive T cells express TCRαV, TCRβV, or any combination thereof. In some embodiments, the subject suffers from an autoimmune disease. In some embodiments, the methods comprise administering to the subject an agent comprising a moiety. In some embodiments, the moiety binds to a TCR variable region.

[0306] In some embodiments, administering the agent depletes a T cell population in a subject by at least about 20%, at least about 25%, at least about 30%, at least about 35%, at least about 40%, at least about 45%, at least about 50%, at least about 55%, at least about 60%, at least about 65%, at least about 70%, at least about 75%, at least about 80%, at least about 85%, at least about 90%, at least about 91%, at least about 92%, at least about 93%, at least about 94%, at least about 95%, at least about 96%, at least about 97%, at least about 98%, at least about 99%, or greater than about 99% compared to a baseline measure of the T cell population (e.g., a measure of T cell population prior to administering of the agent). In some embodiments, administering the agent depletes a T cell population in a subject by at most about 99%, at most about 98%, at most about 97%, at most about 96%, at most about 95%, at most about 94%, at most about 93%, at most about 92%, at most about 91%, at most about 90%, at most about 85%, at most about 80%, at most about 75%, at most about 70%, at most about 65%, at most about 60%, at most about 55%, at most about 50%, at most about 45%, at most about 40%, at most about 35%, at most about 30%, at most about 25%, at most about 20%, or less than about 20% compared to a baseline measure of the T cell population (e.g., a measure of T cell population prior to administering of the agent).

[0307] In some embodiments, administering the agent depletes a T cell population in a subject from about 20% to about 99% compared to a baseline measure of the T cell population (e.g., a measure of T cell population prior to administering of the agent). In some embodiments, administering the agent depletes a T cell population in a subject from about 20% to about 30%, about 20% to about 40%, about 20% to about 50%, about 20% to about 60%, about 20% to about 70%, about 20% to about 75%, about 20% to about 80%, about 20% to about 85%, about 20% to about 90%, about 20% to about 95%, about 20% to about 99%, about 30% to about 40%, about 30% to about 50%, about 30% to about 60%, about 30% to about 70%, about 30% to about 75%, about 30% to about 80%, about 30% to about 85%, about 30% to about 90%, about 30% to about 95%, about 30% to about 99%, about 40% to about 50%, about 40% to about 60%, about 40% to about 70%, about 40% to about 75%, about 40% to about 80%, about 40% to about 85%, about 40% to about 90%, about 40% to about 95%, about 40% to about 99%, about 50% to about 60%, about 50% to about 70%, about 50% to about 75%, about 50% to about 80%, about 50% to about 85%, about 50% to about 90%, about 50% to about 95%, about 50% to about 99%, about 60% to about 70%, about 60% to about 75%, about 60% to about 80%, about 60% to about 85%, about 60% to about 90%, about 60% to about 95%, about 60% to about 99%, about 70% to about 75%, about 70% to about 80%, about 70% to about 85%, about 70% to about 90%, about 70% to about 95%, about 70% to about 99%, about 75% to about 80%, about 75% to about 85%, about 75% to about 90%, about 75% to about 95%, about 75% to about 99%, about 80% to about 85%, about 80% to about 90%, about 80% to about 95%, about 80% to about 99%, about 85% to about 90%, about 85% to about 95%, about 85% to about 99%, about 90% to about 95%, about 90% to about 99%, or about 95% to about 99% compared to a baseline measure of the T cell population (e.g., a measure of T cell population prior to administering of the agent).

[0308] In some embodiments, administering the agent to a subject in need thereof provides sustained reducing and/or depletion of a targeted T cell or T cell population. In some embodiments, administering the agent to a subject in need thereof can deplete T cells for at least about 30 minutes, at least about 1 hour, at least about 2 hours, at least about 3 hours, at least about 4 hours, at least about 5 hours, at least about 6 hours, at least about 12 hours, at least about 1 day, at least about 2 days, at least about 3 days, at least about 4 days, at least about 5 days, at least about 6 days, at least about 7 days, at least about 2 weeks, at least about 3 weeks, at least about 4 weeks, at least about 2 months, at least about 3 months, at least about 4 months, at least about 5 months, at least about 6 months, or greater than about 6 months.

[0309] The methods herein may also provide identifying a subject based on a TCR clonotype. Identifying a subject may comprise genotypying a subject who suffers from a disease or condition. The disease may be an autoimmune disease. The autoimmune disease may be selected from the group consisting of amyotrophic lateral sclerosis (ALS), coeliac disease (CD), ankylosing spondylitis (AS), Covid-induced multisystem inflammatory syndrome in children (MIS-C), primary Sjogren's syndrome (PSS), Churg-Strauss syndrome, sarcoidosis, systemic lupus erythematosus (SLE), type 1 diabetes, autoimmune hepatitis (e.g., type 1 or type 2), primary sclerosing cholangitis, primary biliary cirrhosis, multiple sclerosis, Guillain-Barre syndrome and the AMAN (axonal & neuronal neuropathy), chronic inflammatory demyelinating polyneuropathy (CIDP), transverse myelitis, Tolosa-Hunt syndrome (THS), Devic's disease (neuromyelitis optica), paraneoplastic cerebellardegeneration (PCD), Lambert-Eaton syndrome, psoriasis, scleroderma, CREST (calcinosis,Raynaud phenomenon, esophageal dysmotility, sclerodactyly, and telangiectasia) syndrome,dermatitis herpetiformis, dermatomyositis, bullous pemphigoid, cicatricial pemphigoid/benignmucosal pemphigoid, pemphigoid gestationis, rheumatoid arthritis (RA), psoriatic arthritis, relapsing polychondritis, chronic recurrent multifocal osteomyelitis (CRMO), vasculitis, Kawasaki disease, granulomatosis with polyangiitis (GPA), Behcet's disease (vasculitis),Takayasu's arteritis, polyarteritis nodosa, microscopic polyangiitis (MPA), leukocytoclasticvasculitis, Cogan's syndrome, uveitis, peripheral uveitis (Pars planitis), scleritis, autoimmuneinner ear disease (AIED), Crohn's, ulcerative colitis (UC), Dressler's syndrome, Rheumaticfever, Evans syndrome, paroxysmal nocturnal hemoglobinuria (PNH), hemolytic anemia, thrombocytopenic purpura (TTP), polymyositis, juvenile myositis (JM), including Juvenile Dermatomyositis (JDM) and Juvenile Polymyositis (JPM), ocular cicatricial pemphigoid, or Hashimoto's thyroiditis.

[0310] A sample may be obtained from a subject and sequenced to determining a TCR clonotype associated with the autoimmune disease. The TCR clonotype can comprise a T cell receptor alpha variable region (TCRαV) or a T cell receptor variable beta region (TCRβV). In some embodiments, the genotype may be determined. In some embodiments, commercial methodologies available for genotyping, for example, SNP genotyping, can be used, but are not limited to, TaqMan genotyping assays (Applied Biosystems), SNPlex platforms (Applied Biosystems), gel electrophoresis, capillary electrophoresis, size exclusion chromatography, mass spectrometry, for example, MassARRAY system (Sequenom), minisequencing methods, real-time Polymerase Chain Reaction (PCR), Bio-Plex system (BioRad), CEQ and SNPstream systems (Beckman), array hybridization technology, for example, Affymetrix GeneChip (Perlegen), BeadArray Technologies, for example, Illumina GoldenGate and Infinium assays, array tag technology, Multiplex Ligation-dependent Probe Amplification (MLPA), and endonuclease-based fluorescence hybridization technology (Invader assay, either using unamplified or amplified genomic DNA, or unamplified total RNA, or unamplified or amplified cDNA; Third Wave/Hologic).

### Combination Therapies

[0311] In some embodiments, the method as described herein further comprises administering a second therapeutic agent or therapy to the subject.

[0312] In some embodiments, the second therapeutic agent or therapy comprises a chemotherapeutic agent, a biologic agent, a hormonal therapy, radiation, or surgery.

[0313] In some embodiments, the present invention may be used in combination with immunosuppressive agents, such as cyclosporin, azathioprine, methotrexate, mycophenolate, and FK506, antibodies, or other immunoablative agents such as CAM PATH, anti-CD3 antibodies or other antibody therapies, cytoxin, fludarabine, cyclosporin, FK506, rapamycin, mycophenolic acid, steroids, FR901228, cytokines, and irradiation. These drugs inhibit either the calcium dependent phosphatase calcineurin (cyclosporine and FK506) or inhibit the p70S6 kinase that is important for growth factor induced signaling (rapamycin). (Liu et al., Cell 66:807-815, 1991; Henderson et al., Immun. 73:316-321, 1991; Bierer et al., Curr. Opin. Immun. 5:763-773, 1993). In some embodiments, the compositions and pharmaceutical compositions of the present invention are administered to a patient in conjunction with (e.g., before, simultaneously or following) bone marrow transplantation, T cell ablative therapy using either chemotherapy agents such as, fludarabine, external-beam radiation therapy (XRT), cyclophosphamide, or antibodies such as OKT3 or CAMPATH. For example, in one embodiment, subjects may undergo standard treatment with high dose chemotherapy followed by peripheral blood stem cell transplantation. In certain embodiments, following the transplant, subjects receive an infusion of the expanded immune cells of the present invention. In an additional embodiment, expanded cells are administered before or following surgery.

[0314] In some embodiments, the second therapeutic agent or therapy is administered in combination with the agent as described herein, the nucleic acid molecules as described herein, the vector as described herein, the cell as described herein, the pharmaceutical composition as described herein, sequentially, simultaneously, or concurrently.

[0315] The molecules or the composition as described herein can be used in combination with a second therapeutic agent or procedure.

[0316] In some embodiments, the molecules or the composition as described herein and the second therapeutic agent or procedure are administered/performed after a subject has been diagnosed with an autoimmune disease, e.g., before the autoimmune disease has been eliminated from the subject. In some embodiments, the molecules or the composition as described herein and the second therapeutic agent or procedure are administered/performed simultaneously or concurrently. For example, the delivery of one treatment is still occurring when the delivery of the second commences, e.g., there is an overlap in administration of the treatments. In other embodiments, the molecules or the composition as described herein and the second therapeutic agent or procedure are administered/performed sequentially. For example, the delivery of one treatment ceases before the delivery of the other treatment begins.

[0317] In some embodiments, combination therapy can lead to more effective treatment than monotherapy with either agent alone. In some embodiments, the combination of the first and second treatment is more effective (e.g., leads to a greater reduction in symptoms and/or autoreactive T cells) than the first or second treatment alone. In some embodiments, the combination therapy permits use of a lower dose of the first or the second treatment compared to the dose of the first or second treatment normally required to achieve similar effects when administered as a monotherapy. In some embodiments, the combination therapy has a partially additive effect, wholly additive effect, or greater than additive effect.

[0318] In some embodiments, the anti-TCRαV antibody and/or the anti-TCRβV antibody, multispecific or multifunctional molecule is administered in combination with a therapy, e.g., a autoimmune disease therapy (e.g., one or more of immunotherapy, photodynamic therapy (PDT), surgery and/or radiation). The terms “chemotherapeutic,” “chemotherapeutic agent,” and “anti-cancer agent” are used interchangeably herein. The administration of the multispecific or multifunctional molecule and the therapy, e.g., the autoimmune disease therapy, can be sequential (with or without overlap) or simultaneous. Administration of the anti-TCRαV antibody and/or the anti-TCRβV antibody, multispecific or multifunctional molecule can be continuous or intermittent during the course of therapy (e.g., autoimmune therapy).

[0319] Methods described herein include treating an autoimmune disease in a subject by using the molecules or the composition as described herein, e.g., using a pharmaceutical composition as described herein. Also provided are methods for reducing or ameliorating a symptom of an autoimmune disease in a subject, as well as methods for inhibiting or preventing the activation and/or expansion of autoreactive T cell and/or reducing, depleting, or killing one or more autoreactive T cells. In some embodiments, the methods described herein decrease the number of autoreactive T cells in a subject administered with a described herein or a pharmaceutical composition described herein.

[0320] In some embodiments, the molecules or the composition as described herein (or pharmaceutical composition as described herein) are administered in a manner appropriate to the disease to be treated or prevented. The quantity and frequency of administration will be determined by such factors as the condition of the patient, and the type and severity of the patient's disease. Appropriate dosages may be determined by clinical trials. For example, when “an effective amount” or “a therapeutic amount” is indicated, the precise amount of the pharmaceutical composition (or multispecific or multifunctional molecules) to be administered can be determined by a physician with consideration of individual differences in extent of disease symptoms, age, weight, and condition of the subject. In some embodiments, the pharmaceutical composition described herein can be administered at a dosage of 10⁴ to 10⁹ cells/kg body weight, e.g., 10⁵ to 10⁶ cells/kg body weight, including all integer values within those ranges. In some embodiments, the pharmaceutical composition described herein can be administered multiple times at these dosages. In some embodiments, the pharmaceutical composition described herein can be administered using infusion techniques described in immunotherapy (see, e.g., Rosenberg et al., New Eng. J. of Med. 319:1676, 1988).

### Antibodies Against TCR Variable Region

### Anti-TCRαV Antibodies

[0321] Current bispecific constructs designed utilize antibody fragments (Fab, scFv, VH, single domain antibody, etc.) that are derived from monoclonal antibodies (mAb) directed against the CD3e subunit of the T cell receptor (TCR). However, there are limitations to this approach which may prevent the full realization of the therapeutic potential for such bispecific constructs. Previous studies have shown that even low “activating” doses of anti-CD3e mAb can cause long-term T cell dysfunction and exert immunosuppressive effects. In addition, anti-CD3e mAbs have been associated with side effects that result from massive T cell activation. The large number of activated T cells secrete substantial amounts of cytokines, the most important of which is Interferon gamma (IFNγ). This excess amount of IFNγ in turn activates macrophages which then overproduce proinflammatory cytokines such as IL-1beta, IL-6, IL-10 and TNF-alpha, causing a “cytokine storm” known as the cytokine release syndrome (CRS) (Shimabukuro-Vornhagen et al., J Immunother Cancer. 2018 Jun. 15; 6(1):56, herein incorporated by reference in its entirety). Thus, the need exists for developing antibodies that are capable of binding and activating only a subset of effector T cells, e.g., to re-duce the CRS and/or neurotoxicity (NT).

[0322] Described herein are molecules targeting the TCRαV chain of TCR and methods thereof. Without wishing to be bound by theory, such molecules are capable of binding, activating, and/or expanding only a subset of T cells, avoiding or reducing CRS and/or NT and minimizing potential immunosuppressive effects of anti-CD3 mAbs.

[0323] Described herein is a class of antibodies, i.e., anti-TCRαV antibody molecules as described herein, which despite having low sequence similarity (e.g., low sequence identity among the different antibody molecules that recognize different TCRαV subfamilies), recognize a structurally conserved, yet sequence-wise variable, region, e.g., domain, on the TCRαV protein and have a similar function (e.g., activation of T cells and a similar cytokine profile as described herein). Thus, the anti-TCRαV antibody molecules as described herein share a structure-function relationship.

[0324] In some embodiments, the anti-TCRαV antibody molecules as described herein do not recognize, e.g., bind to, an interface of a TCRβV:TCRalpha complex. In some embodiments, the anti-TCRαV antibody molecules as described herein do not recognize, e.g., bind to, a constant region of a TCRβV protein. In some embodiments, the anti-TCRαV antibody molecules as described herein do not recognize, e.g., bind to, one or more (e.g., all) of a complementarity determining region (e.g., CDR1, CDR2 and/or CDR3) of a TCRβV protein.

[0325] Provided herein are, inter alia, antibody molecules directed to the variable chain of the alpha subunit of TCR (TCRαV) which bind and, e.g., activate a subset of T cells. The anti-TCRαV antibody molecules as described herein result in lesser or no production of cytokines associated with CRS, e.g., IL-6, IL-1beta, IL-10 and TNF alpha; and enhanced and/or delayed production of IL-2 and IFNγ. In some embodiments, the anti-TCRαV antibodies as described herein have a cytokine profile, e.g., as described herein, which differs from a cytokine profile of a T cell engager that binds to a receptor or molecule other than a TCRαV region (“a non-TCRαV-binding T cell engager”). In some embodiments, the non-TCRαV-binding T cell engager comprises an antibody that binds to a CD3 molecule (e.g., CD3 epsilon (CD3e) molecule); or a TCR alpha (TCRα) molecule. In some embodiments, the non-TCRαV-binding T cell engager is an OKT3 antibody or an SP34-2 antibody.

[0326] In some embodiments, the anti-TCRαV antibodies as described herein result in expansion of TCRαV+ T cells, e.g., a subset of memory effector T cells known as TEMRA. Without wishing to be bound by theory, it is believed that in some embodiments, TEMRA cells can promote tumor cell lysis but not CRS. Accordingly, provided herein are methods of making said anti-TCRαV antibody molecules and uses thereof. Also described herein are multispecific molecules, e.g., bispecific molecules comprising said anti-TCRαV antibody molecules. In some embodiments, compositions comprising anti-TCRαV antibody molecules of the present disclosure, can be used, e.g., to: (1) inhibit or prevent the activation and/or expansion of autoreactive T cells; and/or (2) reduce or deplete autoreactive T cells. In some embodiments, compositions comprising anti-TCRαV antibody molecules as described herein limit the harmful side-effects of CRS and/or NT, e.g., CRS and/or NT associated with anti-CD3e targeting.

[0327] In some embodiments, the anti-TCRαV antibody molecule is a full antibody or fragment thereof (e.g., a Fab, F(ab′)₂, Fv, single domain antibody, or a single chain Fv fragment (scFv)). In embodiments, the anti-TCRαV antibody molecule is a monoclonal antibody or an antibody with single specificity. In some embodiments, the anti-TCRαV antibody molecule can also be a humanized, chimeric, camelid, shark, or an in vitro-generated antibody molecule. In some embodiments, the anti-TCRαV antibody molecule is a humanized antibody molecule. The heavy and light chains of the anti-TCRαV antibody molecule can be full-length (e.g., an antibody can include at least one, and preferably two, complete heavy chains, and at least one, and preferably two, complete light chains) or can include an antigen-binding fragment (e.g., a Fab, F(ab′)2, Fv, a single chain Fv fragment, a single domain antibody, a diabody (dAb), a bivalent antibody, or bispecific antibody or fragment thereof, a single domain variant thereof, or a camelid antibody).

[0328] In some embodiments, the anti-TCRαV antibody molecule is in the form of a multispecific molecule, e.g., a bispecific molecule, e.g., as described herein.

[0329] In some embodiments, the anti-TCRαV antibody molecule has a heavy chain constant region (Fc) chosen from, e.g., the heavy chain constant regions of IgG1, IgG2, IgG3, IgG4, IgM, IgAg1, IgA2, IgD, and IgE. In some embodiments, the Fc region is chosen from the heavy chain constant regions of IgG1, IgG2, IgG3, and IgG4. In some embodiments, the Fc region is chosen from the heavy chain constant region of IgG1 or IgG2 (e.g., human IgG1, or IgG2). In some embodiments, the heavy chain constant region is human IgG1. In some embodiments, the Fc region comprises a Fc region variant, e.g., as described herein.

[0330] In some embodiments, the anti-TCRαV antibody molecule has a light chain constant region chosen from, e.g., the light chain constant regions of kappa or lambda, preferably kappa (e.g., human kappa). In some embodiments, the constant region is altered, e.g., mutated, to modify the properties of the anti-TCRαV antibody molecule (e.g., to increase or decrease one or more of: Fc receptor binding, antibody glycosylation, the number of cysteine residues, effector cell function, or complement function). For example, the constant region is mutated at positions 296 (M to Y), 298 (S to T), 300 (T to E), 477 (H to K) and 478 (N to F) to alter Fc receptor binding (e.g., the mutated positions correspond to positions 132 (M to Y), 134 (S to T), 136 (T to E), 313 (H to K) and 314 (N to F) of SEQ ID NOs: 212 or 214; or positions 135 (M to Y), 137 (S to T), 139 (T to E), 316 (H to K) and 317 (N to F) of SEQ ID NOs: 215, 216, 217 or 218), e.g., relative to human IgG1.

[0331] The various TCRαV subfamilies and/or subfamily members can be expressed at different levels in individuals, e.g., healthy individuals, as disclosed in Kitaura K. et al (2016), BMC Immunology vol 17: 38, the entire contents of which are hereby incorporated by reference.

[0332] In some embodiments, the anti-TCRαV antibody molecule is a non-murine antibody molecule, e.g., a human or humanized antibody molecule. In some embodiments, the anti-TCRαV antibody molecule is a human antibody molecule. In some embodiments, the anti-TCRαV antibody molecule is a humanized antibody molecule.

[0333] In some embodiments, the anti-TCRαV antibody molecule is isolated or recombinant.

[0334] In some embodiments, the anti-TCRαV antibody molecule comprises a heavy chain constant region for an IgG4, e.g., a human IgG4. In still another embodiment, the anti-TCRαV antibody molecule includes a heavy chain constant region for an IgG1, e.g., a human IgG1. In some embodiments, the heavy chain constant region comprises an amino sequence set forth in Table 1, or a sequence substantially identical (e.g., at least 80%, 85%, 90%, 92%, 95%, 97%, 98%, 99% or higher identical) thereto.

[0335] In some embodiments, the anti-TCRαV antibody molecule includes a kappa light chain constant region, e.g., a human kappa light chain constant region. In some embodiments, the light chain constant region comprises an amino sequence set forth in Table 1, or a sequence substantially identical (e.g., at least 80%, 85%, 90%, 92%, 95%, 97%, 98%, 99% or higher identical) thereto.

[0336] In some embodiments, e.g., an embodiment comprising a variable region, a CDR (e.g., a combined CDR, Chothia CDR or Kabat CDR), or other sequence referred to herein, the antibody molecule is a monospecific antibody molecule, a bispecific antibody molecule, a bivalent antibody molecule, a biparatopic antibody molecule, or an antibody molecule that comprises an antigen binding fragment of an antibody, e.g., a half antibody or antigen binding fragment of a half antibody. In certain embodiments the antibody molecule comprises a multispecific molecule, e.g., a bispecific molecule, e.g., as described herein.

[0337] In some embodiments, the anti-TCRαV antibody molecule, is a non-murine antibody molecule, e.g., a human or humanized antibody molecule. In some embodiments, the anti-TCRαV antibody molecule is a human antibody molecule. In some embodiments, the anti-TCRαV antibody molecule is a humanized antibody molecule.

[0338] In some embodiments, the anti-TCRαV antibody molecule, is isolated or recombinant.

[0339] In some embodiments, the anti-TCRαV antibody molecule can contain any combination of CDRs or hypervariable loops according to the Kabat and Chothia definitions.

[0340] In some embodiments, e.g., an embodiment comprising a variable region, a CDR (e.g., a combined CDR, Chothia CDR or Kabat CDR), or other sequence referred to herein, the antibody molecule is a monospecific antibody molecule, a bispecific antibody molecule, a bivalent antibody molecule, a biparatopic antibody molecule, or an antibody molecule that comprises an antigen binding fragment of an antibody, e.g., a half antibody or antigen binding fragment of a half antibody. In certain embodiments the antibody molecule comprises a multispecific molecule, e.g., a bispecific molecule, e.g., as described herein.

[0341] In some embodiments, the anti-TCRαV antibody molecule comprises a light chain variable domain comprising: (a) a framework region 1 (FRI) comprising a change, e.g., a substitution (e.g., a conservative substitution) at one or more (e.g., all) positions as described herein according to Kabat numbering, and (b) a framework region 3 (FR3) comprising a change, e.g., a substitution (e.g., a conservative substitution) at one or more (e.g., all) position as described herein according to Kabat numbering. In some embodiments, the substitution is relative to a human germline light chain framework region sequence.

[0342] In some embodiments, the anti-TCRαV antibody molecule is a full antibody or fragment thereof (e.g., a Fab, F(ab′)₂, Fv, or a single chain Fv fragment (scFv)). In embodiments, the anti-TCRαV antibody molecule is a monoclonal antibody or an antibody with single specificity. In some embodiments, the anti-TCRαV antibody molecule can also be a humanized, chimeric, camelid, shark, or an in vitro-generated antibody molecule. In some embodiments, the anti-TCRαV antibody molecule is a humanized antibody molecule. The heavy and light chains of the anti-TCRαV antibody molecule can be full-length (e.g., an antibody can include at least one, and preferably two, complete heavy chains, and at least one, and preferably two, complete light chains) or can include an antigen-binding fragment (e.g., a Fab, F(ab′)2, Fv, a single chain Fv fragment, a single domain antibody, a diabody (dAb), a bivalent antibody, or bispecific antibody or fragment thereof, a single domain variant thereof, or a camelid antibody).

[0343] In some embodiments, the anti-TCRαV antibody molecule is in the form of a multispecific molecule, e.g., a bispecific molecule, e.g., as described herein.

[0344] In some embodiments, the anti-TCRαV antibody molecule has a heavy chain constant region (Fc) chosen from, e.g., the heavy chain constant regions of IgG1, IgG2, IgG3, IgG4, IgM, IgAg1, IgA2, IgD, and IgE. In some embodiments, the Fc region is chosen from the heavy chain constant regions of IgG1, IgG2, IgG3, and IgG4. In some embodiments, the Fc region is chosen from the heavy chain constant region of IgG1 or IgG2 (e.g., human IgG1, or IgG2). In some embodiments, the heavy chain constant region is human IgG1.

[0345] In some embodiments, the anti-TCRαV antibody molecule has a light chain constant region chosen from, e.g., the light chain constant regions of kappa or lambda, preferably kappa (e.g., human kappa). In some embodiments, the constant region is altered, e.g., mutated, to modify the properties of the anti-TCRαV antibody molecule (e.g., to increase or decrease one or more of: Fc receptor binding, antibody glycosylation, the number of cysteine residues, effector cell function, or complement function). For example, the constant region is mutated at positions 296 (M to Y), 298 (S to T), 300 (T to E), 477 (H to K) and 478 (N to F) to alter Fc receptor binding (e.g., the mutated positions correspond to positions 132 (M to Y), 134 (S to T), 136 (T to E), 313 (H to K) and 314 (N to F) of SEQ ID NOs: 212 or 214; or positions 135 (M to Y), 137 (S to T), 139 (T to E), 316 (H to K) and 317 (N to F) of SEQ ID NOs: 215, 216, 217 or 218).

### Anti-TCRα V12 Antibodies

[0346] In one aspect, provided herein is an anti-TCRαV antibody molecule that binds to a human TCRα V12 subfamily member. In some embodiments, TCRα V12 subfamily is also known as TCRα V12. In some embodiments, the TCRα V12 subfamily comprises: TCRα V12-1, TCRα V12-2 or TCRα V12-3, or a variant thereof.

### Anti-TCRα V4 Antibodies

[0347] In one aspect, provided herein is an anti-TCRαV antibody molecule that binds to a human TCRα V4 subfamily member. In some embodiments, TCRα V4 subfamily is also known as TCRα V4.

### Anti-TCRα V21 Antibodies

[0348] In one aspect, provided herein is an anti-TCRαV antibody molecule that binds to a human TCRα V21 subfamily member. In some embodiments, TCRα V21 subfamily is also known as TCRα V21.

### Anti-TCRα V26 Antibodies

[0349] In one aspect, provided herein is an anti-TCRαV antibody molecule that binds to a human TCRα V26 subfamily member. In some embodiments, TCRα V26 subfamily is also known as TCRα V26. In some embodiments, the TCRα V26 subfamily comprises: TCRα V26-1, TCRα V26-2, or a variant thereof.

### Antibodies Against TCRβV

[0350] Described herein are molecules targeting the TCRBV chain of TCR and methods thereof. Without wishing to be bound by theory, such molecules are capable of binding, suppressing, and/or eliminating only a subset of T cells, and reducing immunoresponse mediated either directly or indirectly by the T cells that are bound by such molecules.

[0351] Described herein is a class of antibodies, i.e., anti-TCRβV antibody molecules as described herein, which despite having low sequence similarity (e.g., low sequence identity among the different antibody molecules that recognize different TCRBV subfamilies), recognize a structurally conserved, yet sequence-wise variable, region, e.g., domain, on the TCRBV protein (as denoted by the circled area in FIG. 1A) and have a similar function (e.g., activation of T cells and a similar cytokine profile as described herein). Thus, the anti-TCRβV antibody molecules as described herein share a structure-function relationship.

[0352] Without wishing to be bound by theory, in some embodiments, the anti-TCRβV antibody molecules as described herein bind to an outward facing epitope of a TCRBV protein when it is in a complex with a TCRalpha protein, e.g., as denoted by the circled area in FIG. 1A. In some embodiments, the anti-TCRBV antibody molecules as described herein recognize (e.g., bind to), a domain (e.g., an epitope) on the TCRβV protein that is: (1) structurally conserved among different TCRBV subfamilies; and (2) has minimal sequence identity among the different TCRβV subfamilies. As shown in Table 8, TCRBV proteins from the different TCRBV subfamilies share minimal sequence similarity. However, as shown in FIGS. 1A-1B, TCRβV proteins which have minimal sequence similarity, share a similar 3D conformation and structure.

[0353] The alignment of TCRBV amino acid sequences in Table 8 underscores the diversity of TCR sequences. In particular, the TRBV sequences from different subfamilies are considerably different from each other.

[0354] In some embodiments, the anti-TCRβV antibody molecules as described herein do not recognize, e.g., bind to, an interface of a TCRβV:TCRalpha complex. In some embodiments, the anti-TCRβV antibody molecules as described herein do not recognize, e.g., bind to, a constant region of a TCRβV protein. An exemplary antibody that binds to a constant region of a TCRBV region is JOVI.1 as de-scribed in Viney et al., (Hybridoma. 1992 December; 11(6):701-13). In some embodiments, the anti-TCRβV antibody molecules as described herein do not recognize, e.g., bind to, one or more (e.g., all) of a complementarity determining region (e.g., CDR1, CDR2 and/or CDR3) of a TCRβV protein.

[0355] Provided herein are, inter alia, antibody molecules directed to the variable chain of the beta subunit of TCR (TCRβV) which bind and, e.g., suppress or eliminate a subset of T cells. The anti-TCRβV antibody molecules as described herein result in lesser or no production of cytokines associated with CRS, e.g., IL-6, IL-1beta, IL-10 and TNF alpha; and enhanced and/or delayed production of IL-2 and IFNγ. In some embodiments, the non-TCRβV-binding T cell engager comprises an antibody that binds to a CD3 molecule (e.g., CD3 epsilon (CD3e) molecule); or a TCR alpha (TCRα) molecule. In some embodiments, the non-TCRβV-binding T cell engager is an OKT3 antibody or an SP34-2 antibody.

[0356] In some embodiments, the anti-TCRβV antibodies as described herein result in inhibition or depletion of a biased TCRβV+ clonotype or comprising a TCRBV antigen corresponding to a biased TCRBV clonotype. Without wishing to be bound by theory, a TCR bias may exist in autoimmune diseases. This bias may be associated with dominant autoreactive TCR clones responsible for disease or associated with symptoms. Re-balancing the TCR repertoire, e.g., by eliminating or depleting T cells comprising an autoreactive clonotype, may treat the associated autoimmune disease and/or reduce symptoms of the autoimmune disease. Accordingly, provided herein are methods of making said anti-TCRβV antibody molecules and uses thereof.

[0357] In some embodiments, the anti-TCRβV antibody molecule binds to one or more of TRBV2, TRBV3-1, TRBV4-1, TRBV4-2, TRBV4-3, TRBV5-1, TRBV5-4, TRBV5-5, TRBV5-6, TRBV5-8, TRBV6-1, TRBV6-2, TRBV6-3, TRBV6-4, TRBV6-5, TRBV6-6, TRBV6-8, TRBV6-9, TRBV7-2, TRBV7-3, TRBV7-4, TRBV7-6, TRBV7-7, TRBV7-8, TRBV7-9, TRBV9, TRBV10-1, TRBV10-2, TRBV10-3, TRBV11-1, TRBV11-2, TRBV11-3, TRBV12-3, TRBV12-4, TRBV12-5, TRBV13, TRBV14, TRBV15, TRBV16, TRBV18, TRBV19, TRBV20-1, TRBV24-1, TRBV25-1, TRBV27, TRBV28, TRBV29-1 and TRBV30. In some embodiments, the anti-TCRβV antibody molecule binds to one or more of TRBV6-1, TRBV6-2, TRBV6-3, TRBV6-4, TRBV6-5, TRBV6-6, TRBV6-8 and TRBV6-9. In some embodiments, the anti-TCRβV antibody molecule is an anti-TRBV2, anti-TRBV3-1, anti-TRBV4-1, anti-TRBV4-2, anti-TRBV4-3, anti-TRBV5-1, anti-TRBV5-4, anti-TRBV5-5, anti-TRBV5-6, anti-TRBV5-8, anti-TRBV6-1, anti-TRBV6-2, anti-TRBV6-3, anti-TRBV6-4, anti-TRBV6-5, anti-TRBV6-6, anti-TRBV6-8, anti-TRBV6-9, anti-TRBV7-2, anti-TRBV7-3, anti-TRBV7-4, anti-TRBV7-6, anti-TRBV7-7, anti-TRBV7-8, anti-TRBV7-9, anti-TRBV9, anti-TRBV10-1, anti-TRBV10-2, anti-TRBV10-3, anti-TRBV11-1, anti-TRBV11-2, anti-TRBV11-3, anti-TRBV12-3, anti-TRBV12-4, anti-TRBV12-5, anti-TRBV13, anti-TRBV14, anti-TRBV15, anti-TRBV16, anti-TRBV18, anti-TRBV19, anti-TRBV20-1, anti-TRBV24-1, anti-TRBV25-1, anti-TRBV27, anti-TRBV28, anti-TRBV29-1, or anti-TRBV30. Exemplary anti-TCRβV antibody molecules and the corresponding TCRβV subfamilies recognized by said anti-TCRβV antibody molecules are disclosed in Table 9.

[0358] In some embodiments, the anti-TCRβV antibody molecule binds specifically to TRBV2, TRBV3-1, TRBV4-1, TRBV4-2, TRBV4-3, TRBV5-1, TRBV5-4, TRBV5-5, TRBV5-6, TRBV5-8, TRBV6-1, TRBV6-2, TRBV6-3, TRBV6-4, TRBV6-5, TRBV6-6, TRBV6-8, TRBV6-9, TRBV7-2, TRBV7-3, TRBV7-4, TRBV7-6, TRBV7-7, TRBV7-8, TRBV7-9, TRBV9, TRBV10-1, TRBV10-2, TRBV10-3, TRBV11-1, TRBV11-2, TRBV11-3, TRBV12-3, TRBV12-4, TRBV12-5, TRBV13, TRBV14, TRBV15, TRBV16, TRBV18, TRBV19, TRBV20-1, TRBV24-1, TRBV25-1, TRBV27, TRBV28, TRBV29-1 or TRBV30. In some embodiments, the anti-TCRβV antibody molecule binds specifically to TRBV6-1. In some embodiments, the anti-TCRβV antibody molecule binds specifically to TRBV6-2. In some embodiments, the anti-TCRβV antibody molecule binds specifically to TRBV6-3. In some embodiments, the anti-TCRβV antibody molecule binds specifically to TRBV6-4. In some embodiments, the anti-TCRβV antibody molecule binds specifically to TRBV6-5. In some embodiments, the anti-TCRβV antibody molecule binds specifically to TRBV6-6. In some embodiments, the anti-TCRβV antibody molecule binds specifically to TRBV6-8. In some embodiments, the anti-TCRβV antibody molecule binds specifically to TRBV6-9.

[0359] In some embodiments, the anti-TCRβV antibody molecule binds specifically to a TRBV that is associated with an autoimmune disease, such as TRBV4, TRBV6-1, TRBV6-2, TRBV6-3, TRBV6-5, TRBV6-2/3, TRBV7.1, TRBV7, TRBV7-8, TRBV7-9, TRBV7-8/9, TRBV9, TRBV10-3, TRBV11-2, TRBV12-3, TRBV12-4, TRBV12-3/4, TRBV20-1, TRBV23, or TRBV29-1. In some embodiments, the anti-TCRβV antibody molecule binds specifically to TRBV4. In some embodiments, the anti-TCRβV antibody molecule binds specifically to TRBV6-1. In some embodiments, the anti-TCRβV antibody molecule binds specifically to TRBV6-2. In some embodiments, the anti-TCRβV antibody molecule binds specifically to TRBV6-3. In some embodiments, the anti-TCRβV antibody molecule binds specifically to TRBV6-5. In some embodiments, the anti-TCRβV antibody molecule binds specifically to TRBV6-2/3. In some embodiments, the anti-TCRβV antibody molecule binds specifically to TRBV7.1. In some embodiments, the anti-TCRβV antibody molecule binds specifically to TRBV7. In some embodiments, the anti-TCRβV antibody molecule binds specifically to TRBV7-8. In some embodiments, the anti-TCRβV antibody molecule binds specifically to TRBV7-9. In some embodiments, the anti-TCRβV antibody molecule binds specifically to TRBV7-8/9. In some embodiments, the anti-TCRβV antibody molecule binds specifically to TRBV9. In some embodiments, the anti-TCRβV antibody molecule binds specifically to TRBV10-3. In some embodiments, the anti-TCRβV antibody molecule binds specifically to TRBV11-2. In some embodiments, the anti-TCRβV antibody molecule binds specifically to TRBV12-3. In some embodiments, the anti-TCRβV antibody molecule binds specifically to TRBV12-4. In some embodiments, the anti-TCRβV antibody molecule binds specifically to TRBV12-3/4. In some embodiments, the anti-TCRβV antibody molecule binds specifically to TRBV20-1. In some embodiments, the anti-TCRβV antibody molecule binds specifically to TRBV23. In some embodiments, the anti-TCRβV antibody molecule binds specifically to TRBV29-1.

[0360] In some embodiments, the anti-TCRβV antibody molecule, e.g., anti-TCRβ V6 (e.g., anti-TCRβ V6-5*01) antibody molecule, comprises a light chain variable domain comprising a framework region, e.g., framework region 1 (FRI), comprising a change, e.g., a substitution (e.g., a conservative substitution) at position 10 according to Kabat numbering. In some embodiments, the FRI comprises a Phenylalanine at position 10, e.g., a Serine to Phenyalanine substitution. In some embodiments, the substitution is relative to a human germline light chain framework region sequence.

[0361] In some embodiments, the anti-TCRβV antibody molecule, e.g., anti-TCRβ V6 (e.g., anti-TCRβ V6-5*01) antibody molecule, comprises a light chain variable domain comprising a framework region, e.g., framework region 2 (FR2), comprising a change, e.g., a substitution (e.g., a conservative substitution) at a position as described herein according to Kabat numbering. In some embodiments, FR2 comprises a Histidine at position 36, e.g., a substitution at position 36 according to Kabat numbering, e.g., a Tyrosine to Histidine substitution. In some embodiments, FR2 comprises an Alanine at position 46, e.g., a substitution at position 46 according to Kabat numbering, e.g., an Arginine to Alanine substitution. In some embodiments, the substitution is relative to a human germline light chain framework region sequence.

[0362] In some embodiments, the anti-TCRβV antibody molecule, e.g., anti-TCRβ V6 (e.g., anti-TCRβ V6-5*01) antibody molecule, comprises a light chain variable domain comprising a framework region, e.g., framework region 3 (FR3), comprising a change, e.g., a substitution (e.g., a conservative substitution) at a position as described herein according to Kabat numbering. In some embodiments, FR3 comprises a Phenyalanine at position 87, e.g., a substitution at position 87 according to Kabat numbering, e.g., a Tyrosine to Phenyalanine substitution. In some embodiments, the substitution is relative to a human germline light chain framework region sequence.

[0363] In some embodiments, the anti-TCRβV antibody molecule, e.g., anti-TCRβ V6 (e.g., anti-TCRβ V6-5*01) antibody molecule, comprises a light chain variable domain comprising: (a) a framework region 1 (FRI) comprising a Phenylalanine at position 10, e.g., a substitution at position 10 according to Kabat numbering, e.g., a Serine to Phenyalanine substitution; (b) a framework region 2 (FR2) comprising a Histidine at position 36, e.g., a substitution at position 36 according to Kabat numbering, e.g., a Tyrosine to Histidine substitution, and a Alanine at position 46, e.g., a substitution at position 46 according to Kabat numbering, e.g., a Arginine to Alanine substitution; and (c) a framework region 3 (FR3) comprising a Phenylalanine at position 87, e.g., a substitution at position 87 according to Kabat numbering, e.g., a Tyrosine to Phenyalanine substitution, e.g., as shown in the amino acid sequence of SEQ ID NO: 10. In some embodiments, the substitution is relative to a human germline light chain framework region sequence.

[0364] In some embodiments, the anti-TCRβV antibody molecule, e.g., anti-TCRβ V6 (e.g., anti-TCRβ V6-5*01) antibody molecule, comprises a light chain variable domain comprising: (a) a framework region 2 (FR2) comprising a Histidine at position 36, e.g., a substitution at position 36 according to Kabat numbering, e.g., a Tyrosine to Histidine substitution, and a Alanine at position 46, e.g., a substitution at position 46 according to Kabat numbering, e.g., a Arginine to Alanine substitution; and (b) a framework region 3 (FR3) comprising a Phenylalanine at position 87, e.g., a substitution at position 87 according to Kabat numbering, e.g., a Tyrosine to Phenyalanine substitution, e.g., as shown in the amino acid sequence of SEQ ID NO: 11. In some embodiments, the substitution is relative to a human germline light chain framework region sequence.

[0365] In some embodiments, the anti-TCRβV antibody molecule, e.g., anti-TCRβ V6 (e.g., anti-TCRβ V6-5*01) antibody molecule, comprises a light chain variable domain comprising: (a) a framework region 1 (FRI) comprising a change, e.g., a substitution (e.g., a conservative substitution) at one or more (e.g., all) positions as described herein according to Kabat numbering, (b) a framework region 2 (FR2) comprising a change, e.g., a substitution (e.g., a conservative substitution) at one or more (e.g., all) position as described herein according to Kabat numbering and (c) a framework region 3 (FR3) comprising a change, e.g., a substitution (e.g., a conservative substitution) at one or more (e.g., all) position as described herein according to Kabat numbering. In some embodiments, the substitution is relative to a human germline light chain framework region sequence.

[0366] In some embodiments, the anti-TCRβV antibody molecule, e.g., anti-TCRβ V6 (e.g., anti-TCRβ V6-5*01) antibody molecule, comprises the heavy chain framework region 1 of A-H.1 or A-H.2. In some embodiments, the anti-TCRβV antibody molecule, e.g., anti-TCRβ V6 (e.g., anti-TCRβ V6-5*01) antibody molecule, comprises the heavy chain framework region 2 of A-H.1 or A-H.2. In some embodiments, the anti-TCRβV antibody molecule, e.g., anti-TCRβ V6 (e.g., anti-TCRβ V6-5*01) antibody molecule, comprises the heavy chain framework region 3 of A-H.1 or A-H.2. In some embodiments, the anti-TCRβV antibody molecule, e.g., anti-TCRβ V6 (e.g., anti-TCRβ V6-5*01) antibody molecule, comprises the heavy chain framework region 4 of A-H.1 or A-H.2.

[0367] In some embodiments, the anti-TCRβV antibody molecule, e.g., anti-TCRβ V6 (e.g., anti-TCRβ V6-5*01) antibody molecule, comprises a heavy chain variable domain comprising a framework region, e.g., framework region 3 (FR3), comprising a change, e.g., a substitution (e.g., a conservative substitution) at a position as described herein according to Kabat numbering. In some embodiments, FR3 comprises a Threonine at position 73, e.g., a substitution at position 73 according to Kabat numbering, e.g., a Glutamic Acid to Threonine substitution. In some embodiments, FR3 comprises a Glycine at position 94, e.g., a substitution at position 94 according to Kabat numbering, e.g., an Arginine to Glycine substitution. In some embodiments, the substitution is relative to a human germline heavy chain framework region sequence.

[0368] In some embodiments, the anti-TCRβV antibody molecule, e.g., anti-TCRβ V6 (e.g., anti-TCRβ V6-5*01) antibody molecule, comprises a heavy chain variable domain comprising a framework region 3 (FR3) comprising a Threonine at position 73, e.g., a substitution at position 73 according to Kabat numbering, e.g., a Glutamic Acid to Threonine substitution, and a Glycine at position 94, e.g., a substitution at position 94 according to Kabat numbering, e.g., a Arginine to Glycine substitution, e.g., as shown in the amino acid sequence of SEQ ID NO: 10.

[0369] In some embodiments, the anti-TCRβV antibody molecule, e.g., anti-TCRβ V6 (e.g., anti-TCRβ V6-5*01) antibody molecule, comprises the heavy chain framework regions 1-4 of A-H.1 or A-H.2, e.g., SEQ ID NO: 9. In some embodiments, the anti-TCRβV antibody molecule, e.g., anti-TCRβ V6 (e.g., anti-TCRβ V6-5*01) antibody molecule, comprises the light chain framework regions 1-4 of A-H.1, e.g., SEQ ID NO: 10. In some embodiments, the anti-TCRβV antibody molecule, e.g., anti-TCRβ V6 (e.g., anti-TCRβ V6-5*01) antibody molecule, comprises the light chain framework regions 1-4 of A-H.2, e.g., SEQ ID NO: 11. In some embodiments, the anti-TCRβV antibody molecule, e.g., anti-TCRβ V6 (e.g., anti-TCRβ V6-5*01) antibody molecule, comprises the heavy chain framework regions 1-4 of A-H.1, e.g., SEQ ID NO: 9; and the light chain framework regions 1-4 of A-H.1, e.g., SEQ ID NO: 10. In some embodiments, the anti-TCRβV antibody molecule, e.g., anti-TCRβ V6 (e.g., anti-TCRβ V6-5*01) antibody molecule, comprises the heavy chain framework regions 1-4 of A-H.2, e.g., SEQ ID NO: 9; and the light chain framework regions 1-4 of A-H.2, e.g., SEQ ID NO: 11.

[0370] In some embodiments, the heavy or light chain variable domain, or both, of the anti-TCRβV antibody molecule, e.g., anti-TCRβ V6 (e.g., anti-TCRβ V6-5*01) antibody molecule, includes an amino acid sequence, which is substantially identical to an amino acid as described herein, e.g., at least 80%, 85%, 90%, 92%, 95%, 97%, 98%, 99% or higher identical to a variable region of an antibody described herein, e.g., an antibody chosen from any one of A-H.1 to A-H.85, e.g., A-H.1, A-H.2 or A-H.68, or as described in Table 1, or encoded by the nucleotide sequence in Table 1; or which differs at least 1 or 5 residues, but less than 40, 30, 20, or 10 residues, from a variable region of an antibody described herein.

[0371] In some embodiments, the anti-TCRβV antibody molecule, e.g., anti-TCRβ V6 (e.g., anti-TCRβ V6-5*01) antibody molecule, comprises at least one, two, three, or four antigen-binding regions, e.g., variable regions, having an amino acid sequence as set forth in Table 1, or a sequence substantially identical thereto (e.g., a sequence at least about 85%, 90%, 95%, 99% or more identical thereto, or which differs by no more than 1, 2, 5, 10, or 15 amino acid residues from the sequences shown in Table 1. In another embodiment, the anti-TCRβV antibody molecule, e.g., anti-TCRβ V6 (e.g., anti-TCRβ V6-5*01) antibody molecule includes a VH and/or VL domain encoded by a nucleic acid having a nucleotide sequence as set forth in Table 1, or a sequence substantially identical thereto (e.g., a sequence at least about 85%, 90%, 95%, 99% or more identical thereto, or which differs by no more than 3, 6, 15, 30, or 45 nucleotides from the sequences shown in Table 1.

[0372] In some embodiments, the anti-TCRβV antibody molecule, e.g., anti-TCRβ V6 (e.g., anti-TCRβ V6-5*01) antibody molecule, comprises: a VH domain comprising the amino acid sequence of SEQ ID NO: 9, an amino acid sequence at least about 85%, 90%, 95%, 99% or more identical to the amino acid sequence of SEQ ID NO: 9, or an amino acid sequence which differs by no more than 1, 2, 5, 10, or 15 amino acid residues from the amino acid sequence of SEQ ID NO: 9; and/or a VL domain comprising the amino acid sequence of SEQ ID NO: 10, an amino acid sequence at least about 85%, 90%, 95%, 99% or more identical to the amino acid sequence of SEQ ID NO: 10, or an amino acid sequence which differs by no more than 1, 2, 5, 10, or 15 amino acid residues from the amino acid sequence of SEQ ID NO: 10.

[0373] In some embodiments, the anti-TCRβV antibody molecule, e.g., anti-TCRβ V6 (e.g., anti-TCRβ V6-5*01) antibody molecule, comprises: a VH domain comprising the amino acid sequence of SEQ ID NO: 9, an amino acid sequence at least about 85%, 90%, 95%, 99% or more identical to the amino acid sequence of SEQ ID NO: 9, or an amino acid sequence which differs by no more than 1, 2, 5, 10, or 15 amino acid residues from the amino acid sequence of SEQ ID NO: 9; and/or a VL domain comprising the amino acid sequence of SEQ ID NO: 11, an amino acid sequence at least about 85%, 90%, 95%, 99% or more identical to the amino acid sequence of SEQ ID NO: 11, or an amino acid sequence which differs by no more than 1, 2, 5, 10, or 15 amino acid residues from the amino acid sequence of SEQ ID NO: 11.

[0374] In some embodiments, the anti-TCRβV antibody molecule, e.g., anti-TCRβ V6 (e.g., anti-TCRβ V6-5*01) antibody molecule is a full antibody or fragment thereof (e.g., a Fab, F(ab′)₂, Fv, single domain antibody, or a single chain Fv fragment (scFv)). In embodiments, the anti-TCRβV antibody molecule, e.g., anti-TCRβ V6 (e.g., anti-TCRβ V6-5*01) antibody molecule is a monoclonal antibody or an antibody with single specificity. In some embodiments, the anti-TCRβV antibody molecule, e.g., anti-TCRβ V6 (e.g., anti-TCRβ V6-5*01) antibody molecule, can also be a humanized, chimeric, camelid, shark, or an in vitro-generated antibody molecule. In some embodiments, the anti-TCRβV antibody molecule, e.g., anti-TCRβ V6 (e.g., anti-TCRβ V6-5*01) antibody molecule, is a humanized antibody molecule. The heavy and light chains of the anti-TCRβV antibody molecule, e.g., anti-TCRβ V6 (e.g., anti-TCRβ V6-5*01) antibody molecule, can be full-length (e.g., an antibody can include at least one, and preferably two, complete heavy chains, and at least one, and preferably two, complete light chains) or can include an antigen-binding fragment (e.g., a Fab, F(ab′)2, Fv, a single chain Fv fragment, a single domain antibody, a diabody (dAb), a bivalent antibody, or bispecific antibody or fragment thereof, a single domain variant thereof, or a camelid antibody).

[0375] In some embodiments, the anti-TCRβV antibody molecule, e.g., anti-TCRβ V6 (e.g., anti-TCRβ V6-5*01) antibody molecule, is in the form of a TCR targeting molecule, e.g., a bispecific molecule, e.g., as described herein.

[0376] In some embodiments, the anti-TCRβV antibody molecule, e.g., anti-TCRβ V6 (e.g., anti-TCRβ V6-5*01) antibody molecule, has a heavy chain constant region (Fc) chosen from, e.g., the heavy chain constant regions of IgG1, IgG2, IgG3, IgG4, IgM, IgA1, IgA2, IgD, and IgE. In some embodiments, the Fc region is chosen from the heavy chain constant regions of IgG1, IgG2, IgG3, and IgG4. In some embodiments, the Fc region is chosen from the heavy chain constant region of IgG1 or IgG2 (e.g., human IgG1, or IgG2). In some embodiments, the heavy chain constant region is human IgG1. In some embodiments, the Fc region comprises a Fc region variant, e.g., as described herein.

[0377] In some embodiments, the anti-TCRβV antibody molecule, e.g., anti-TCRβ V6 (e.g., anti-TCRβ V6-5*01) antibody molecule, has a light chain constant region chosen from, e.g., the light chain constant regions of kappa or lambda, preferably kappa (e.g., human kappa). In some embodiments, the constant region is altered, e.g., mutated, to modify the properties of the anti-TCRβV antibody molecule, e.g., anti-TCRβ V6 (e.g., anti-TCRβ V6-5*01) antibody molecule (e.g., to increase or decrease one or more of: Fc receptor binding, antibody glycosylation, the number of cysteine residues, effector cell function, or complement function). For example, the constant region is mutated at positions 296 (M to Y), 298 (S to T), 300 (T to E), 477 (H to K) and 478 (N to F) to alter Fc receptor binding (e.g., the mutated positions correspond to positions 132 (M to Y), 134 (S to T), 136 (T to E), 313 (H to K) and 314 (N to F) of SEQ ID NOs: 212 or 214; or positions 135 (M to Y), 137 (S to T), 139 (T to E), 316 (H to K) and 317 (N to F) of SEQ ID NOs: 215, 216, 217 or 218), e.g., relative to human IgG1.

[0378] Antibody A-H.1 comprises a heavy chain comprising the amino acid sequence of SEQ ID NO: 3278 and a light chain comprising the amino acid sequence of SEQ ID NO: 72. Antibody A-H.2 comprises a heavy chain comprising the amino acid sequence of SEQ ID NO: 3278 and a light chain comprising the amino acid sequence of SEQ ID NO: 3279. Antibody A-H.68 comprises the amino acid sequence of SEQ ID NO: 1337, or a sequence having at least 85%, 90%, 95%, 96%, 97%, 98%, 99%, 99.5%, 99.9%, or 100% sequence identity thereto. Antibody A-H.69 comprises the amino acid sequence of SEQ ID NO: 1500, or a sequence having at least 85%, 90%, 95%, 96%, 97%, 98%, 99%, 99.5%, 99.9%, or 100% sequence identity thereto.

[0379] Additional exemplary humanized anti-TCRB V6 antibodies are provided in Table 1. In some embodiments, the anti-TCRβ V6 is antibody A, e.g., humanized antibody A (antibody A-H), as provided in Table 1. In some embodiments, the anti-TCRβV antibody comprises one or more (e.g., all three) of a LC CDR1, LC CDR2, and LC CDR3 provided in Table 1; and/or one or more (e.g., all three) of a HC CDR1, HC CDR2, and HC CDR3 provided in Table 1, or a sequence with at least 85%, 90%, 95%, 96%, 97%, 98%, 99%, 99.5%, 99.9%, or 100% sequence identity thereto. In some embodiments, antibody A comprises a variable heavy chain (VH) and/or a variable light chain (VL) provided in Table 1, or a sequence with at least 85%, 90%, 95%, 96%, 97%, 98%, 99%, 99.5%, 99.9%, or 100% sequence identity thereto.

[0380] In some embodiments, the anti-TCRβV antibody molecule, e.g., anti-TCRβ V6 (e.g., anti-TCRβ V6-5*01) antibody molecule comprises a VH of A-H.1, A-H.2, A-H.3, A-H.4, A-H.5, A-H.6, A-H.7, A-H.8, A-H.9, A-H.10, A-H.11, A-H.12, A-H.13, A-H.14, A-H.15, A-H.16, A-H.17, A-H.18, A-H.19, A-H.20, A-H.21, A-H.22, A-H.23, A-H.24, A-H.25, A-H.26, A-H.27, A-H.28, A-H.29, A-H.30, A-H.31, A-H.32, A-H.33, A-H.34, A-H.35, A-H.36, A-H.37, A-H.38, A-H.39, A-H.40, A-H.1, A-H.42, A-H.43, A-H.44, A-H.45, A-H.46, A-H.47, A-H.48, A-H.49, A-H.50, A-H.51, A-H.52, A-H.53, A-H.54, A-H.55, A-H.56, A-H.57, A-H.58, A-H.59, A-H.60, A-H.61, A-H.62, A-H.63, A-H.64, A-H.65, A-H.66, A-H.67, A-H.68, A-H.69, A-H.70, A-H.71, A-H.72, A-H.73, A-H.74, A-H.75, A-H.76, A-H.77, A-H.78, A-H.79, A-H.80, A-H.81, A-H.82, A-H.83, A-H.84, or A-H.85, or a sequence with at least 80%, 85%, 90%, 95%, 96%, 97%, 98%, 99% or more identity thereto.

[0381] In some embodiments, the anti-TCRβV antibody molecule, e.g., anti-TCRβ V6 (e.g., anti-TCRβ V6-5*01) antibody molecule comprises a VL of A-H.1, A-H.2, A-H.3, A-H.4, A-H.5, A-H.6, A-H.7, A-H.8, A-H.9, A-H.10, A-H.11, A-H.12, A-H.13, A-H.14, A-H.15, A-H.16, A-H.17, A-H.18, A-H.19, A-H.20, A-H.21, A-H.22, A-H.23, A-H.24, A-H.25, A-H.26, A-H.27, A-H.28, A-H.29, A-H.30, A-H.31, A-H.32, A-H.33, A-H.34, A-H.35, A-H.36, A-H.37, A-H.38, A-H.39, A-H.40, A-H.1, A-H.42, A-H.43, A-H.44, A-H.45, A-H.46, A-H.47, A-H.48, A-H.49, A-H.50, A-H.51, A-H.52, A-H.53, A-H.54, A-H.55, A-H.56, A-H.57, A-H.58, A-H.59, A-H.60, A-H.61, A-H.62, A-H.63, A-H.64, A-H.65, A-H.66, A-H.67, A-H.68, A-H.69, A-H.70, A-H.71, A-H.72, A-H.73, A-H.74, A-H.75, A-H.76, A-H.77, A-H.78, A-H.79, A-H.80, A-H.81, A-H.82, A-H.83, A-H.84, or A-H.85, or a sequence with at least 80%, 85%, 90%, 95%, 96%, 97%, 98%, 99% or more identity thereto.

[0382] In some embodiments, the anti-TCRβV antibody molecule, e.g., anti-TCRβ V6 (e.g., anti-TCRβ V6-5*01) antibody molecule comprises a VH of A-H.1, A-H.2, A-H.3, A-H.4, A-H.5, A-H.6, A-H.7, A-H.8, A-H.9, A-H.10, A-H.11, A-H.12, A-H.13, A-H.14, A-H.15, A-H.16, A-H.17, A-H.18, A-H.19, A-H.20, A-H.21, A-H.22, A-H.23, A-H.24, A-H.25, A-H.26, A-H.27, A-H.28, A-H.29, A-H.30, A-H.31, A-H.32, A-H.33, A-H.34, A-H.35, A-H.36, A-H.37, A-H.38, A-H.39, A-H.40, A-H.1, A-H.42, A-H.43, A-H.44, A-H.45, A-H.46, A-H.47, A-H.48, A-H.49, A-H.50, A-H.51, A-H.52, A-H.53, A-H.54, A-H.55, A-H.56, A-H.57, A-H.58, A-H.59, A-H.60, A-H.61, A-H.62, A-H.63, A-H.64, A-H.65, A-H.66, A-H.67, A-H.68, A-H.69, A-H.70, A-H.71, A-H.72, A-H.73, A-H.74, A-H.75, A-H.76, A-H.77, A-H.78, A-H.79, A-H.80, A-H.81, A-H.82, A-H.83, A-H.84, or A-H.85, or a sequence with at least 80%, 85%, 90%, 95%, 96%, 97%, 98%, 99% or more identity thereto; and a VL of A-H.1, A-H.2, A-H.3, A-H.4, A-H.5, A-H.6, A-H.7, A-H.8, A-H.9, A-H.10, A-H.11, A-H.12, A-H.13, A-H.14, A-H.15, A-H.16, A-H.17, A-H.18, A-H.19, A-H.20, A-H.21, A-H.22, A-H.23, A-H.24, A-H.25, A-H.26, A-H.27, A-H.28, A-H.29, A-H.30, A-H.31, A-H.32, A-H.33, A-H.34, A-H.35, A-H.36, A-H.37, A-H.38, A-H.39, A-H.40, A-H.1, A-H.42, A-H.43, A-H.44, A-H.45, A-H.46, A-H.47, A-H.48, A-H.49, A-H.50, A-H.51, A-H.52, A-H.53, A-H.54, A-H.55, A-H.56, A-H.57, A-H.58, A-H.59, A-H.60, A-H.61, A-H.62, A-H.63, A-H.64, A-H.65, A-H.66, A-H.67, A-H.68, A-H.69, A-H.70, A-H.71, A-H.72, A-H.73, A-H.74, A-H.75, A-H.76, A-H.77, A-H.78, A-H.79, A-H.80, A-H.81, A-H.82, A-H.83, A-H.84, or A-H.85, or a sequence with at least 80%, 85%, 90%, 95%, 96%, 97%, 98%, 99% or more identity thereto.

[0383] Exemplary anti-TCRβV antibody molecules and the corresponding TCRβV subfamilies recognized by said anti-TCRβV antibody molecules are disclosed in Table 9.

[0384] The various TCRβV subfamilies and/or subfamily members can be expressed at different levels in individuals, e.g., healthy individuals, as disclosed in Kitaura K. et al (2016), BMC Immunology vol 17: 38, the entire contents of which are hereby incorporated by reference. For example, TCRβ V6-5 is represented in approximately 3-6% healthy donors.

### Anti-TCRβ V6 Antibodies

[0385] In one aspect, provided herein is an anti-TCRβV antibody molecule that binds to human TCRβ V6, e.g., a TCRβ V6 subfamily comprising: TCRβ V6-4*01, TCRβ V6-4*02, TCRβ V6-9*01, TCRβ V6-8*01, TCRβ V6-5*01, TCRβ V6-6*02, TCRβ V6-6*01, TCRβ V6-2*01, TCRβ V6-3*01 or TCRβ V6-1*01. In some embodiments the TCRβ V6 subfamily comprises TCRβ V6-5*01 or a variant thereof. In some embodiments, TCRβ V6 comprises TCRβ V6-4*01, or a variant thereof. In some embodiments, TCRβ V6 comprises TCRβ V6-4*02, or a variant thereof. In some embodiments, TCRβ V6 comprises TCRβ V6-9*01, or a variant thereof. In some embodiments, TCRβ V6 comprises TCRβ V6-8*01, or a variant thereof. In some embodiments, TCRβ V6 comprises TCRβ V6-5*01, or a variant thereof. In some embodiments, TCRβ V6 comprises TCRβ V6-6*02, or a variant thereof. In some embodiments, TCRβ V6 comprises TCRβ V6-6*01, or a variant thereof. In some embodiments, TCRβ V6 comprises TCRβ V6-2*01, or a variant thereof. In some embodiments, TCRβ V6 comprises TCRβ V6-3*01, or a variant thereof. In some embodiments, TCRβ V6 comprises TCRβ V6-1*01, or a variant thereof.

[0386] In some embodiments, TCRβ V6-5*01 is encoded by the nucleic acid sequence of SEQ ID NO: 43, or a sequence having 85%, 90%, 95%, 99% or more identity thereof. In some embodiments, TCRβ V6-5*01 comprises the amino acid sequence of SEQ ID NO: 44, or an amino acid sequence having 85%, 90%, 95%, 99% or more identity thereof.

[0387] In some embodiments, the anti-TCRβV antibody molecule, e.g., anti-TCRβ V6 (e.g., anti-TCRβ V6-5*01) antibody molecule, is a non-murine antibody molecule, e.g., a human or humanized antibody molecule. In some embodiments, the anti-TCRβV antibody molecule, e.g., anti-TCRβ V6 (e.g., anti-TCRβ V6-5*01) antibody molecule is a human antibody molecule. In some embodiments, the anti-TCRβV antibody molecule, e.g., anti-TCRβ V6 (e.g., anti-TCRβ V6-5*01) antibody molecule is a humanized antibody molecule.

[0388] In some embodiments, the anti-TCRβV antibody molecule, e.g., anti-TCRβ V6 (e.g., anti-TCRβ V6-5*01) antibody molecule, is isolated or recombinant.

[0389] In some embodiments, the anti-TCRβV antibody molecule, e.g., anti-TCRβ V6 (e.g., anti-TCRβ V6-5*01) antibody molecule, comprises at least one antigen-binding region, e.g., a variable region or an antigen-binding fragment thereof, from an antibody described herein, e.g., an antibody chosen from any one of A-H.1 to A-H.85, e.g., A-H.1, A-H.2 or A-H.68, or an antibody described in Table 1, or encoded by a nucleotide sequence in Table 1, or a sequence substantially identical (e.g., at least 80%, 85%, 90%, 92%, 95%, 97%, 98%, 99% or higher identical) to any of the aforesaid sequences.

[0390] In some embodiments, the anti-TCRβV antibody molecule, e.g., anti-TCRβ V6 (e.g., anti-TCRβ V6-5*01) antibody molecule, comprises at least one, two, three or four variable regions from an antibody described herein, e.g., an antibody chosen from any one of A-H.1 to A-H.85, e.g., A-H.1, A-H.2 or A-H.68, or an antibody described in Table 1, or encoded by a nucleotide sequence in Table 1, or a sequence substantially identical (e.g., at least 80%, 85%, 90%, 92%, 95%, 97%, 98%, 99% or higher identical) to any of the aforesaid sequences.

[0391] In some embodiments, the anti-TCRβV antibody molecule, e.g., anti-TCRβ V6 (e.g., anti-TCRβ V6-5*01) antibody molecule, comprises at least one or two heavy chain variable regions from an antibody described herein, e.g., an antibody chosen from any one of A-H.1 to A-H.85, e.g., A-H.1, A-H.2 or A-H.68, or an antibody molecule described in Table 1, or encoded by a nucleotide sequence in Table 1, or a sequence substantially identical (e.g., at least 80%, 85%, 90%, 92%, 95%, 97%, 98%, 99% or higher identical) to any of the aforesaid sequences.

[0392] In some embodiments, the anti-TCRβV antibody molecule comprises a heavy chain variable region (VH) having a consensus sequence of SEQ ID NO: 231 or 3290.

-Consensus VH
SEQ ID NO: 231
QVQLVQSGAEVKKPGSSVKVSCKASGH/T/G/YD/T/SFH/R/D/K/
TL/D/K/T/NW/F/T/I/Y/GYIHWVRQAPGQGLEWMGR/WV/I/FF/
S/YA/PGSGN/ST/V/Y/IK/RYNEKFKGRVTITADTSTSTAYMELSSL
RSEDTAVYYCAG/VSY/IYSY/AD/GVLDYWGQGTTVTVSS

### SEQ ID NO: 3290—Consensus VH

[0393] QVQLVQSGAEVKKPGSSVKVSCKASGX₁X₂FX₃X₄X₅YIHWVRQAPGQGLEWMGXX₇X₈X₉GSGX₁₀X₁₁X₁₂YNEKFKGRVTITADTSTSTAYMELSSLRSEDTAVYYCAX₁₃SX₁₄YSX₁₅X₁₆VLDYWGQGTT VTVSS, where-in: X1 is H or T or G or Y; X2 is D or T or S; X3 is H or R or D or K or T; X4 is L or D or K or T or N; X5 is W or F or T or I or Y or G; X6 is R or W; X7 is V or I or F; X8 is F or S or Y; X9 is A or P; X10 is N or S; X11 is T or V or Y or I; X12 is K or R; X13 is G or V; X14 is Y or I; X15 is Y or A; and X16 is D or G.

[0394] In some embodiments, the anti-TCRβV antibody molecule, e.g., anti-TCRβ V6 (e.g., anti-TCRβ V6-5*01) antibody molecule, comprises at least one or two light chain variable regions from an antibody described herein, e.g., an antibody chosen from any one of A-H.1 to A-H.85, e.g., A-H.1, A-H.2 or A-H.68, or an antibody described in Table 1, or encoded by a nucleotide sequence in Table 1, or a sequence substantially identical (e.g., at least 80%, 85%, 90%, 92%, 95%, 97%, 98%, 99% or higher identical) to any of the aforesaid sequences.

[0395] In some embodiments, the anti-TCRβV antibody molecule comprises a light chain variable region (VL) having a consensus sequence of SEQ ID NO: 230 or 3289.

-Consensus VL
SEQ ID NO: 230
DIQMTQSPSFLSASVGDRVTITCKASQNVG/E/A/DN/DR/KVAWY/
HQQKPGKAPKALIYSSSHRYK/SGVPSRFSGSGSGTEFTLTISSLQPED
FATYFCQQFKSYPLTFGQGTKLEIK

### SEQ ID NO: 3289—Consensus VL

[0396] DIQMTQSPSFLSASVGDRVTITCKASQNVX₁X₂X₃VAWX₄QQKPGKAPKALIYSSSHRYXSGVPSRF SGSGSGTEFTLTISSLQPEDFATYFCQQFKSYPLTFGQGTKLEIK, wherein X1 is G, E, A or D; X2 is N or D; X3 is R or K; X4 is Y or H; and X5 is K or S

[0397] In some embodiments, the anti-TCRβV antibody molecule, e.g., anti-TCRβ V6 (e.g., anti-TCRβ V6-5*01) antibody molecule, comprises a heavy chain constant region for an IgG4, e.g., a human IgG4. In still another embodiment, the anti-TCRβV antibody molecule, e.g., anti-TCRβ V6 (e.g., anti-TCRβ V6-5*01) antibody molecule includes a heavy chain constant region for an IgG1, e.g., a human IgG1. In some embodiments, the heavy chain constant region comprises an amino sequence set forth in Table 3, or a sequence substantially identical (e.g., at least 80%, 85%, 90%, 92%, 95%, 97%, 98%, 99% or higher identical) thereto.

[0398] In some embodiments, the anti-TCRβV antibody molecule, e.g., anti-TCRβ V6 (e.g., anti-TCRβ V6-5*01) antibody molecule, includes a kappa light chain constant region, e.g., a human kappa light chain constant region. In some embodiments, the light chain constant region comprises an amino sequence set forth in Table 3, or a sequence substantially identical (e.g., at least 80%, 85%, 90%, 92%, 95%, 97%, 98%, 99% or higher identical) thereto.

[0399] In some embodiments, the anti-TCRβV antibody molecule, e.g., anti-TCRβ V6 (e.g., anti-TCRβ V6-5*01) antibody molecule, includes at least one, two, or three complementarity determining regions (CDRs) from a heavy chain variable region (VH) of an antibody described herein, e.g., an antibody chosen from any one of A-H.1 to A-H.85, e.g., A-H.1, A-H.2 or A-H.68, or an antibody described in Table 1, or encoded by a nucleotide sequence in Table 1, or a sequence substantially identical (e.g., at least 80%, 85%, 90%, 92%, 95%, 97%, 98%, 99% or higher identical) to any of the aforesaid sequences.

[0400] In some embodiments, the anti-TCRβV antibody molecule, e.g., anti-TCRβ V6 (e.g., anti-TCRβ V6-5*01) antibody molecule, includes at least one, two, or three CDRs (or collectively all of the CDRs) from a heavy chain variable region comprising an amino acid sequence shown in Table 1, or encoded by a nucleotide sequence shown in Table 1. In some embodiments, one or more of the CDRs (or collectively all of the CDRs) have one, two, three, four, five, six or more changes, e.g., amino acid substitutions or deletions, relative to the amino acid sequence shown in Table 1, or encoded by a nucleotide sequence shown in Table 1.

[0401] In some embodiments, the anti-TCRβV antibody molecule, e.g., anti-TCRβ V6 (e.g., anti-TCRβ V6-5*01) antibody molecule, includes at least one, two, or three complementarity determining regions (CDRs) from a light chain variable region of an antibody described herein, e.g., an antibody chosen from any one of A-H.1 to A-H.85, e.g., A-H.1, A-H.2 or A-H.68, or an antibody described in Table 1, or encoded by a nucleotide sequence in Table 1, or a sequence substantially identical (e.g., at least 80%, 85%, 90%, 92%, 95%, 97%, 98%, 99% or higher identical) to any of the aforesaid sequences.

[0402] In some embodiments, the anti-TCRβV antibody molecule, e.g., anti-TCRβ V6 (e.g., anti-TCRβ V6-5*01) antibody molecule, includes at least one, two, or three CDRs (or collectively all of the CDRs) from a light chain variable region comprising an amino acid sequence shown in Table 1, or encoded by a nucleotide sequence shown in Table 1. In some embodiments, one or more of the CDRs (or collectively all of the CDRs) have one, two, three, four, five, six or more changes, e.g., amino acid substitutions or deletions, relative to the amino acid sequence shown in Table 1, or encoded by a nucleotide sequence shown in Table 1.

[0403] In some embodiments, the anti-TCRβV antibody molecule, e.g., anti-TCRβ V6 (e.g., anti-TCRβ V6-5*01) antibody molecule, includes at least one, two, three, four, five or six CDRs (or collectively all of the CDRs) from a heavy and light chain variable region comprising an amino acid sequence shown in Table 1, or encoded by a nucleotide sequence shown in Table 1. In some embodiments, one or more of the CDRs (or collectively all of the CDRs) have one, two, three, four, five, six or more changes, e.g., amino acid substitutions or deletions, relative to the amino acid sequence shown in Table 1, or encoded by a nucleotide sequence shown in Table 1.

[0404] In some embodiments, the anti-TCRβV antibody molecule, e.g., anti-TCRβ V6 (e.g., anti-TCRβ V6-5*01) antibody molecule, molecule includes all six CDRs from an antibody described herein, e.g., an antibody chosen from any one of A-H.1 to A-H.85, e.g., A-H.1, A-H.2 or A-H.68, or an antibody described in Table 1, or encoded by a nucleotide sequence in Table 1, or closely related CDRs, e.g., CDRs which are identical or which have at least one amino acid alteration, but not more than two, three or four alterations (e.g., substitutions, deletions, or insertions, e.g., conservative substitutions). In some embodiments, the anti-TCRβV antibody molecule, e.g., anti-TCRβ V6 (e.g., anti-TCRβ V6-5*01) antibody molecule, may include any CDR described herein.

[0405] In some embodiments, the anti-TCRβV antibody molecule, e.g., anti-TCRβ V6 (e.g., anti-TCRβ V6-5*01) antibody molecule includes at least one, two, or three CDRs according to Kabat et al. (e.g., at least one, two, or three CDRs according to the Kabat definition as set out in Table 1) from a heavy chain variable region of an antibody described herein, e.g., an antibody chosen from any one of A-H.1 to A-H.85, e.g., A-H.1, A-H.2 or A-H.68, or an antibody described in Table 1, or a sequence substantially identical (e.g., at least 80%, 85%, 90%, 92%, 95%, 97%, 98%, 99% or higher identical) to any of the aforesaid sequences; or which have at least one amino acid alteration, but not more than two, three or four alterations (e.g., substitutions, deletions, or insertions, e.g., conservative substitutions) relative to one, two, or three CDRs according to Kabat et al. shown in Table 1.

[0406] In some embodiments, the anti-TCRβV antibody molecule, e.g., anti-TCRβ V6 (e.g., anti-TCRβ V6-5*01) antibody molecule includes at least one, two, or three CDRs according to Kabat et al. (e.g., at least one, two, or three CDRs according to the Kabat definition as set out in Table 1) from a light chain variable region of an antibody described herein, e.g., an antibody chosen from any one of A-H.1 to A-H.85, e.g., A-H.1, A-H.2 or A-H.68, or an antibody described in Table 1, or a sequence substantially identical (e.g., at least 80%, 85%, 90%, 92%, 95%, 97%, 98%, 99% or higher identical) to any of the aforesaid sequences; or which have at least one amino acid alteration, but not more than two, three or four alterations (e.g., substitutions, deletions, or insertions, e.g., conservative substitutions) relative to one, two, or three CDRs according to Kabat et al. shown in Table 1.

[0407] In some embodiments, the anti-TCRβV antibody molecule, e.g., anti-TCRβ V6 (e.g., anti-TCRβ V6-5*01) antibody molecule, includes at least one, two, three, four, five, or six CDRs according to Kabat et al. (e.g., at least one, two, three, four, five, or six CDRs according to the Kabat definition as set out in Table 1) from the heavy and light chain variable regions of an antibody described herein, e.g., an antibody chosen from any one of A-H.1 to A-H.85, e.g., A-H.1, A-H.2 or A-H.68, or an antibody described in Table 1, or encoded by a nucleotide sequence in Table 1; or a sequence substantially identical (e.g., at least 80%, 85%, 90%, 92%, 95%, 97%, 98%, 99% or higher identical) to any of the aforesaid sequences; or which have at least one amino acid alteration, but not more than two, three or four alterations (e.g., substitutions, deletions, or insertions, e.g., conservative substitutions) relative to one, two, three, four, five, or six CDRs according to Kabat et al. shown in Table 1.

[0408] In some embodiments, the anti-TCRβV antibody molecule, e.g., anti-TCRβ V6 (e.g., anti-TCRβ V6-5*01) antibody molecule, includes all six CDRs according to Kabat et al. (e.g., all six CDRs according to the Kabat definition as set out in Table 1) from the heavy and light chain variable regions of an antibody described herein, e.g., an antibody chosen from any one of A-H.1 to A-H.85, e.g., A-H.1, A-H.2 or A-H.68, or an antibody described in Table 1, or encoded by a nucleotide sequence in Table 1; or a sequence substantially identical (e.g., at least 80%, 85%, 90%, 92%, 95%, 97%, 98%, 99% or higher identical) to any of the aforesaid sequences; or which have at least one amino acid alteration, but not more than two, three or four alterations (e.g., substitutions, deletions, or insertions, e.g., conservative substitutions) relative to all six CDRs according to Kabat et al. shown in Table 1. In some embodiments, the anti-TCRβV antibody molecule, e.g., anti-TCRβ V6 (e.g., anti-TCRβ V6-5*01) antibody molecule, may include any CDR described herein.

[0409] In some embodiments, the anti-TCRβV antibody molecule, e.g., anti-TCRβ V6 (e.g., anti-TCRβ V6-5*01) antibody molecule, includes at least one, two, or three hypervariable loops that have the same canonical structures as the corresponding hypervariable loop of an antibody described herein, e.g., an antibody chosen from chosen from any one of A-H.1 to A-H.85, e.g., A-H.1, A-H.2 or A-H.68, e.g., the same canonical structures as at least loop 1 and/or loop 2 of the heavy and/or light chain variable domains of an antibody described herein. See, e.g., Chothia et al., (1992) J. Mol. Biol. 227:799-817; Tomlinson et al., (1992) J. Mol. Biol. 227:776-798 for descriptions of hypervariable loop canonical structures. These structures can be determined by inspection of the tables described in these references.

[0410] In some embodiments, the anti-TCRβV antibody molecule, e.g., anti-TCRβ V6 (e.g., anti-TCRβ V6-5*01) antibody molecule includes at least one, two, or three CDRs according to Chothia et al. (e.g., at least one, two, or three CDRs according to the Chothia definition as set out in Table 1) from a heavy chain variable region of an antibody described herein, e.g., an antibody chosen from any one of A-H.1 to A-H.85, e.g., A-H.1, A-H.2 or A-H.68, or as described in Table 1, or a sequence substantially identical (e.g., at least 80%, 85%, 90%, 92%, 95%, 97%, 98%, 99% or higher identical) to any of the aforesaid sequences; or which have at least one amino acid alteration, but not more than two, three or four alterations (e.g., substitutions, deletions, or insertions, e.g., conservative substitutions) relative to one, two, or three CDRs according to Chothia et al. shown in Table 1.

[0411] In some embodiments, the anti-TCRβV antibody molecule, e.g., anti-TCRβ V6 (e.g., anti-TCRβ V6-5*01) antibody molecule includes at least one, two, or three CDRs according to Chothia et al. (e.g., at least one, two, or three CDRs according to the Chothia definition as set out in Table 1) from a light chain variable region of an antibody described herein, e.g., an antibody chosen from any one of A-H.1 to A-H.85, e.g., A-H.1, A-H.2 or A-H.68, or an antibody described in Table 1, or a sequence substantially identical (e.g., at least 80%, 85%, 90%, 92%, 95%, 97%, 98%, 99% or higher identical) to any of the aforesaid sequences; or which have at least one amino acid alteration, but not more than two, three or four alterations (e.g., substitutions, deletions, or insertions, e.g., conservative substitutions) relative to one, two, or three CDRs according to Chothia et al. shown in Table 1.

[0412] In some embodiments, the anti-TCRβV antibody molecule, e.g., anti-TCRβ V6 (e.g., anti-TCRβ V6-5*01) antibody molecule, includes at least one, two, three, four, five, or six CDRs according to Chothia et al. (e.g., at least one, two, three, four, five, or six CDRs according to the Chothia definition as set out in Table 1) from the heavy and light chain variable regions of an antibody described herein, e.g., an antibody chosen from any one of A-H.1 to A-H.85, e.g., A-H.1, A-H.2 or A-H.68, or an antibody described in Table 1, or encoded by the nucleotide sequence in Table 1; or a sequence substantially identical (e.g., at least 80%, 85%, 90%, 92%, 95%, 97%, 98%, 99% or higher identical) to any of the aforesaid sequences; or which have at least one amino acid alteration, but not more than two, three or four alterations (e.g., substitutions, deletions, or insertions, e.g., conservative substitutions) relative to one, two, three, four, five, or six CDRs according to Chothia et al. shown in Table 1.

[0413] In some embodiments, the anti-TCRβV antibody molecule, e.g., anti-TCRβ V6 (e.g., anti-TCRβ V6-5*01) antibody molecule, includes all six CDRs according to Chothia et al. (e.g., all six CDRs according to the Chothia definition as set out in Table 1) from the heavy and light chain variable regions of an antibody described herein, e.g., an antibody chosen from any one of A-H.1 to A-H.85, e.g., A-H.1, A-H.2 or A-H.68, or an antibody described in Table 1, or encoded by a nucleotide sequence in Table 1; or a sequence substantially identical (e.g., at least 80%, 85%, 90%, 92%, 95%, 97%, 98%, 99% or higher identical) to any of the aforesaid sequences; or which have at least one amino acid alteration, but not more than two, three or four alterations (e.g., substitutions, deletions, or insertions, e.g., conservative substitutions) relative to all six CDRs according to Chothia et al. shown in Table 1. In some embodiments, the anti-TCRβV antibody molecule, e.g., anti-TCRβ V6 (e.g., anti-TCRβ V6-5*01) antibody molecule, may include any CDR described herein.

[0414] In some embodiments, the anti-TCRβV antibody molecule, e.g., anti-TCRβ V6 (e.g., anti-TCRβ V6-5*01) antibody molecule, molecule includes a combination of CDRs or hypervariable loops defined according to Kabat et al., Chothia et al., or as described in Table 1.

[0415] In some embodiments, the anti-TCRβV antibody molecule, e.g., anti-TCRβ V6 (e.g., anti-TCRβ V6-5*01) antibody molecule, can contain any combination of CDRs or hypervariable loops according to the Kabat and Chothia definitions.

[0416] In some embodiments, a combined CDR as set out in Table 1 is a CDR that comprises a Kabat CDR and a Chothia CDR.

[0417] In some embodiments, the anti-TCRβV antibody molecule, e.g., anti-TCRβ V6 (e.g., anti-TCRβ V6-5*01) antibody molecule, molecule includes a combination of CDRs or hypervariable loops identified as combined CDRs in Table 1. In some embodiments, the anti-TCRβV antibody molecule, e.g., anti-TCRβ V6 (e.g., anti-TCRβ V6-5*01) antibody molecule, can contain any combination of CDRs or hypervariable loops according the “combined” CDRs are described in Table 1.

[0418] In some embodiments, e.g., an embodiment comprising a variable region, a CDR (e.g., a combined CDR, Chothia CDR or Kabat CDR), or other sequence referred to herein, e.g., in Table 1, the antibody molecule is a monospecific antibody molecule, a bispecific antibody molecule, a bivalent antibody molecule, a biparatopic antibody molecule, or an antibody molecule that comprises an antigen binding fragment of an antibody, e.g., a half antibody or antigen binding fragment of a half antibody. In certain embodiments the antibody molecule comprises a TCR targeting molecule, e.g., a bispecific molecule, e.g., as described herein.

[0419] In some embodiments, the anti-TCRβV antibody molecule, e.g., anti-TCRβ V6 (e.g., anti-TCRβ V6-5*01) antibody molecule includes: (i) one, two or all of a light chain complementarity determining region 1 (LC CDR1), a light chain complementarity determining region 2 (LC CDR2), and a light chain complementarity determining region 3 (LC CDR3) of SEQ ID NO: 2, SEQ ID NO: 10 or SEQ ID NO: 11, and/or (ii) one, two or all of a heavy chain complementarity determining region 1 (HC CDR1), heavy chain complementarity determining region 2 (HC CDR2), and a heavy chain complementarity determining region 3 (HC CDR3) of SEQ ID NO: 1 or SEQ ID NO: 9.

[0420] In some embodiments, the anti-TCRβV antibody molecule, e.g., anti-TCRβ V6 (e.g., anti-TCRβ V6-5*01) antibody molecule comprises a LC CDR1, LC CDR2, and LC CDR3 of SEQ ID NO: 2, and a HC CDR1, HC CDR2, and HC CDR3 of SEQ ID NO: 1.

[0421] In some embodiments the anti-TCRβV antibody molecule, e.g., anti-TCRβ V6 (e.g., anti-TCRβ V6-5*01) antibody molecule comprises a LC CDR1, LC CDR2, and LC CDR3 of SEQ ID NO: 10, and a HC CDR1, HC CDR2, and HC CDR3 of SEQ ID NO: 9.

[0422] In some embodiments, the anti-TCRβV antibody molecule, e.g., anti-TCRβ V6 (e.g., anti-TCRβ V6-5*01) antibody molecule comprises a LC CDR1, LC CDR2, and LC CDR3 of SEQ ID NO: 11, and a HC CDR1, HC CDR2, and HC CDR3 of SEQ ID NO: 9.

[0423] In some embodiments, the anti-TCRβV antibody molecule, e.g., anti-TCRβ V6 (e.g., anti-TCRβ V6-5*01) antibody molecule comprises: (i) a LC CDR1 amino acid sequence of SEQ ID NO: 6, a LC CDR2 amino acid sequence of SEQ ID NO: 7, or a LC CDR3 amino acid sequence of SEQ ID NO: 8; and/or (ii) a HC CDR1 amino acid sequence of SEQ ID NO: 3, a HC CDR2 amino acid sequence of SEQ ID NO: 4, or a HC CDR3 amino acid sequence of SEQ ID NO: 5.

[0424] In some embodiments, the anti-TCRβV antibody molecule, e.g., anti-TCRβ V6 (e.g., anti-TCRβ V6-5*01) antibody molecule comprises: (i) a light chain variable region (VL) comprising a LC CDR1 amino acid sequence of SEQ ID NO: 6, a LC CDR2 amino acid sequence of SEQ ID NO: 7, or a LC CDR3 amino acid sequence of SEQ ID NO: 8; and/or (ii) a heavy chain variable region (VH) comprising a HC CDR1 amino acid sequence of SEQ ID NO: 3, a HC CDR2 amino acid sequence of SEQ ID NO: 4, or a HC CDR3 amino acid sequence of SEQ ID NO: 5.

[0425] In some embodiments, the anti-TCRβV antibody molecule, e.g., anti-TCRβ V6 (e.g., anti-TCRβ V6-5*01) antibody molecule comprises: (i) a LC CDR1 amino acid sequence of SEQ ID NO: 51, a LC CDR2 amino acid sequence of SEQ ID NO: 52, or a LC CDR3 amino acid sequence of SEQ ID NO: 53; and/or (ii) a HC CDR1 amino acid sequence of SEQ ID NO: 45, a HC CDR2 amino acid sequence of SEQ ID NO: 46, or a HC CDR3 amino acid sequence of SEQ ID NO: 47.

[0426] In some embodiments, the anti-TCRβV antibody molecule, e.g., anti-TCRβ V6 (e.g., anti-TCRβ V6-5*01) antibody molecule comprises: (i) a light chain variable region (VL) comprising a LC CDR1 amino acid sequence of SEQ ID NO: 51, a LC CDR2 amino acid sequence of SEQ ID NO: 52, or a LC CDR3 amino acid sequence of SEQ ID NO: 53; and/or (ii) a heavy chain variable region (VH) comprising a HC CDR1 amino acid sequence of SEQ ID NO: 45, a HC CDR2 amino acid sequence of SEQ ID NO: 46, or a HC CDR3 amino acid sequence of SEQ ID NO: 47.

[0427] In some embodiments, the anti-TCRβV antibody molecule, e.g., anti-TCRβ V6 (e.g., anti-TCRβ V6-5*01) antibody molecule comprises: (i) a LC CDR1 amino acid sequence of SEQ ID NO: 54, a LC CDR2 amino acid sequence of SEQ ID NO: 55, or a LC CDR3 amino acid sequence of SEQ ID NO: 56; and/or (ii) a HC CDR1 amino acid sequence of SEQ ID NO: 48, a HC CDR2 amino acid sequence of SEQ ID NO: 49, or a HC CDR3 amino acid sequence of SEQ ID NO: 50.

[0428] In some embodiments, the anti-TCRβV antibody molecule, e.g., anti-TCRβ V6 (e.g., anti-TCRβ V6-5*01) antibody molecule comprises: (i) a light chain variable region (VL) comprising a LC CDR1 amino acid sequence of SEQ ID NO: 54, a LC CDR2 amino acid sequence of SEQ ID NO: 55, or a LC CDR3 amino acid sequence of SEQ ID NO: 56; and/or (ii) a heavy chain variable region (VH) comprising a HC CDR1 amino acid sequence of SEQ ID NO: 48, a HC CDR2 amino acid sequence of SEQ ID NO: 49, or a HC CDR3 amino acid sequence of SEQ ID NO: 50.

[0429] In some embodiments, the anti-TCRβV antibody molecule, e.g., anti-TCRβ V6 (e.g., anti-TCRβ V6-5*01) antibody molecule comprises a VH and/or a VL of an antibody described in Table 1, or a sequence with at least 80%, 85%, 90%, 95%, 96%, 97%, 98%, 99% or more identity thereto.

[0430] In some embodiments, the anti-TCRβV antibody molecule, e.g., anti-TCRβ V6 (e.g., anti-TCRβ V6-5*01) antibody molecule comprises a VH and a VL of an antibody described in Table 1, or a sequence with at least 80%, 85%, 90%, 95%, 96%, 97%, 98%, 99% or more identity thereto.

[0431] In some embodiments, an anti-TCRVb antibody as described herein has an antigen binding domain having a VL having a consensus sequence of SEQ ID NO: 230, wherein position 30 is G, E, A or D; position 31 is N or D; position 32 is R or K; position 36 is Y or H; and/or position 56 is K or S.

[0432] In some embodiments, an anti-TCRVb antibody as described herein has an antigen binding domain having a VH having a consensus sequence of SEQ ID NO: 231, wherein: position 27 is H or T or G or Y; position 28 is D or T or S; position 30 is H or R or D or K or T; position 31 is L or D or K or T or N; position 32 is W or F or T or I or Y or G; position 49 is R or W; position 50 is V or I or F; position 51 is F or S or Y; position 52 is A or P; position 56 is N or S; position 57 is T or V or Y or I; position 58 is K or R; position 97 is G or V; position 99 is Y or I; position 102 is Y or A; and/or position 103 is D or G.

### Anti-TCRβ V12 Antibodies

[0433] In one aspect, provided herein is an anti-TCRβV antibody molecule that binds to human TCRβ V12, e.g., a TCRβ V12 subfamily comprising: TCRβ V12-4*01, TCRβ V12-3*01 or TCRβ V12-5*01. In some embodiments the TCRβ V12 subfamily comprises TCRβ V12-4*01. In some embodiments the TCRβ V12 subfamily comprises TCRβ V12-3*01.

[0434] In some embodiments, the anti-TCRβV antibody molecule, e.g., anti-TCRβ V12 antibody molecule, is a non-murine antibody molecule, e.g., a human or humanized antibody molecule. In some embodiments, the anti-TCRβV antibody molecule, e.g., anti-TCRβ V12 antibody molecule is a human antibody molecule. In some embodiments, the anti-TCRβV antibody molecule, e.g., anti-TCRβ V12 antibody molecule is a humanized antibody molecule.

[0435] In some embodiments, the anti-TCRβV antibody molecule, e.g., anti-TCRβ V12 antibody molecule, is isolated or recombinant.

[0436] In some embodiments, the anti-TCRβV antibody molecule, e.g., anti-TCRβ V12 antibody molecule, comprises at least one antigen-binding region, e.g., a variable region or an antigen-binding fragment thereof, from an antibody described herein, e.g., an antibody described in Table 2, or encoded by a nucleotide sequence in Table 2, or a sequence substantially identical (e.g., at least 80%, 85%, 90%, 92%, 95%, 97%, 98%, 99% or higher identical) to any of the aforesaid sequences.

[0437] In some embodiments, the anti-TCRβV antibody molecule, e.g., anti-TCRβ V12 antibody molecule, comprises at least one, two, three or four variable regions from an antibody described herein, e.g., an antibody as described in Table 2, or encoded by a nucleotide sequence in Table 2, or a sequence substantially identical (e.g., at least 80%, 85%, 90%, 92%, 95%, 97%, 98%, 99% or higher identical) to any of the aforesaid sequences.

[0438] In some embodiments, the anti-TCRβV antibody molecule, e.g., anti-TCRβ V12 antibody molecule, comprises at least one or two heavy chain variable regions from an antibody described herein, e.g., an antibody as described in Table 2, or encoded by a nucleotide sequence in Table 2, or a sequence substantially identical (e.g., at least 80%, 85%, 90%, 92%, 95%, 97%, 98%, 99% or higher identical) to any of the aforesaid sequences.

[0439] In some embodiments, the anti-TCRβV antibody molecule, e.g., anti-TCRβ V12 antibody molecule, comprises at least one or two light chain variable regions from an antibody described herein, e.g., an antibody as described in Table 2, or encoded by a nucleotide sequence in Table 2, or a sequence substantially identical (e.g., at least 80%, 85%, 90%, 92%, 95%, 97%, 98%, 99% or higher identical) to any of the aforesaid sequences.

[0440] In some embodiments, the anti-TCRβV antibody molecule, e.g., anti-TCRβ V12 antibody molecule, comprises a heavy chain constant region for an IgG4, e.g., a human IgG4. In still another embodiment, the anti-TCRβV antibody molecule, e.g., anti-TCRβ V12 antibody molecule, includes a heavy chain constant region for an IgG1, e.g., a human IgG1. In some embodiments, the heavy chain constant region comprises an amino sequence set forth in Table 3, or a sequence substantially identical (e.g., at least 80%, 85%, 90%, 92%, 95%, 97%, 98%, 99% or higher identical) thereto.

[0441] In some embodiments, the anti-TCRβV antibody molecule, e.g., anti-TCRβ V12 antibody molecule, includes a kappa light chain constant region, e.g., a human kappa light chain constant region. In some embodiments, the light chain constant region comprises an amino sequence set forth in Table 3, or a sequence substantially identical (e.g., at least 80%, 85%, 90%, 92%, 95%, 97%, 98%, 99% or higher identical) thereto.

[0442] In some embodiments, the anti-TCRβV antibody molecule, e.g., anti-TCRβ V12 antibody molecule, includes at least one, two, or three complementarity determining regions (CDRs) from a heavy chain variable region of an antibody described herein, e.g., an antibody as described in Table 2, or encoded by the nucleotide sequence in Table 2, or a sequence substantially identical (e.g., at least 80%, 85%, 90%, 92%, 95%, 97%, 98%, 99% or higher identical) to any of the aforesaid sequences.

[0443] In some embodiments, the anti-TCRβV antibody molecule, e.g., anti-TCRβ V12 antibody molecule, includes at least one, two, or three CDRs (or collectively all of the CDRs) from a heavy chain variable region comprising an amino acid sequence shown in Table 2, or encoded by a nucleotide sequence shown in Table 2. In some embodiments, one or more of the CDRs (or collectively all of the CDRs) have one, two, three, four, five, six or more changes, e.g., amino acid substitutions or deletions, relative to the amino acid sequence shown in Table 2, or encoded by a nucleotide sequence shown in Table 2.

[0444] In some embodiments, the anti-TCRβV antibody molecule, e.g., anti-TCRβ V12 antibody molecule, includes at least one, two, or three complementarity determining regions (CDRs) from a light chain variable region of an antibody described herein, e.g., an antibody as described in Table 2, or encoded by the nucleotide sequence in Table 2, or a sequence substantially identical (e.g., at least 80%, 85%, 90%, 92%, 95%, 97%, 98%, 99% or higher identical) to any of the aforesaid sequences.

[0445] In some embodiments, the anti-TCRβV antibody molecule, e.g., anti-TCRβ V12 antibody molecule, includes at least one, two, or three CDRs (or collectively all of the CDRs) from a light chain variable region comprising an amino acid sequence shown in Table 2, or encoded by a nucleotide sequence shown in Table 2. In some embodiments, one or more of the CDRs (or collectively all of the CDRs) have one, two, three, four, five, six or more changes, e.g., amino acid substitutions or deletions, relative to the amino acid sequence shown in Table 2, or encoded by a nucleotide sequence shown in Table 2.

[0446] In some embodiments, the anti-TCRβV antibody molecule, e.g., anti-TCRβ V12 antibody molecule, includes at least one, two, three, four, five or six CDRs (or collectively all of the CDRs) from a heavy and light chain variable region comprising an amino acid sequence shown in Table 2, or encoded by a nucleotide sequence shown in Table 2. In some embodiments, one or more of the CDRs (or collectively all of the CDRs) have one, two, three, four, five, six or more changes, e.g., amino acid substitutions or deletions, relative to the amino acid sequence shown in Table 2, or encoded by a nucleotide sequence shown in Table 2.

[0447] In some embodiments, the anti-TCRβV antibody molecule, e.g., anti-TCRβ V12 antibody molecule, molecule includes all six CDRs from an antibody described herein, e.g., an antibody as described in Table 2, or encoded by the nucleotide sequence in Table 2, or closely related CDRs, e.g., CDRs which are identical or which have at least one amino acid alteration, but not more than two, three or four alterations (e.g., substitutions, deletions, or insertions, e.g., conservative substitutions). In some embodiments, the anti-TCRβV antibody molecule, e.g., anti-TCRβ V12 antibody molecule, may include any CDR described herein.

[0448] In some embodiments, the anti-TCRβV antibody molecule, e.g., anti-TCRβ V12 antibody molecule includes at least one, two, or three CDRs according to Kabat et al. (e.g., at least one, two, or three CDRs according to the Kabat definition as set out in Table 2) from a heavy chain variable region of an antibody described herein, e.g., an antibody chosen as described in Table 2, or a sequence substantially identical (e.g., at least 80%, 85%, 90%, 92%, 95%, 97%, 98%, 99% or higher identical) to any of the aforesaid sequences; or which have at least one amino acid alteration, but not more than two, three or four alterations (e.g., substitutions, deletions, or insertions, e.g., conservative substitutions) relative to one, two, or three CDRs according to Kabat et al. shown in Table 2.

[0449] In some embodiments, the anti-TCRβV antibody molecule, e.g., anti-TCRβ V12 antibody molecule includes at least one, two, or three CDRs according to Kabat et al. (e.g., at least one, two, or three CDRs according to the Kabat definition as set out in Table 2) from a light chain variable region of an antibody described herein, e.g., an antibody as described in Table 2, or a sequence substantially identical (e.g., at least 80%, 85%, 90%, 92%, 95%, 97%, 98%, 99% or higher identical) to any of the aforesaid sequences; or which have at least one amino acid alteration, but not more than two, three or four alterations (e.g., substitutions, deletions, or insertions, e.g., conservative substitutions) relative to one, two, or three CDRs according to Kabat et al. shown in Table 2.

[0450] In some embodiments, the anti-TCRβV antibody molecule, e.g., anti-TCRβ V12 antibody molecule includes at least one, two, three, four, five, or six CDRs according to Kabat et al. (e.g., at least one, two, three, four, five, or six CDRs according to the Kabat definition as set out in Table 2) from the heavy and light chain variable regions of an antibody described herein, e.g., an antibody as described in Table 2, or encoded by the nucleotide sequence in Table 2; or a sequence substantially identical (e.g., at least 80%, 85%, 90%, 92%, 95%, 97%, 98%, 99% or higher identical) to any of the aforesaid sequences; or which have at least one amino acid alteration, but not more than two, three or four alterations (e.g., substitutions, deletions, or insertions, e.g., conservative substitutions) relative to one, two, three, four, five, or six CDRs according to Kabat et al. shown in Table 2.

[0451] In some embodiments, the anti-TCRβV antibody molecule, e.g., anti-TCRβ V12 antibody molecule includes all six CDRs according to Kabat et al. (e.g., all six CDRs according to the Kabat definition as set out in Table 2) from the heavy and light chain variable regions of an antibody described herein, e.g., an antibody as described in Table 2, or encoded by the nucleotide sequence in Table 2; or encoded by the nucleotide sequence in Table 2; or a sequence substantially identical (e.g., at least 80%, 85%, 90%, 92%, 95%, 97%, 98%, 99% or higher identical) to any of the aforesaid sequences; or which have at least one amino acid alteration, but not more than two, three or four alterations (e.g., substitutions, deletions, or insertions, e.g., conservative substitutions) relative to all six CDRs according to Kabat et al. shown in Table 2. In some embodiments, the anti-TCRβV antibody molecule, e.g., anti-TCRβ V12 antibody molecule may include any CDR described herein.

[0452] In some embodiments, the anti-TCRβV antibody molecule, e.g., anti-TCRβ V12 antibody molecule includes at least one, two, or three hypervariable loops that have the same canonical structures as the corresponding hypervariable loop of an antibody described herein, e.g., an antibody described in Table 2, e.g., the same canonical structures as at least loop 1 and/or loop 2 of the heavy and/or light chain variable domains of an antibody described herein. See, e.g., Chothia et al., (1992) J. Mol. Biol. 227:799-817; Tomlinson et al., (1992) J. Mol. Biol. 227:776-798 for descriptions of hypervariable loop canonical structures. These structures can be determined by inspection of the tables described in these references.

[0453] In some embodiments, the anti-TCRβV antibody molecule, e.g., anti-TCRβ V12 antibody molecule includes at least one, two, or three CDRs according to Chothia et al. (e.g., at least one, two, or three CDRs according to the Chothia definition as set out in Table 2) from a heavy chain variable region of an antibody described herein, e.g., an antibody chosen as described in Table 2, or a sequence substantially identical (e.g., at least 80%, 85%, 90%, 92%, 95%, 97%, 98%, 99% or higher identical) to any of the aforesaid sequences; or which have at least one amino acid alteration, but not more than two, three or four alterations (e.g., substitutions, deletions, or insertions, e.g., conservative substitutions) relative to one, two, or three CDRs according to Chothia et al. shown in Table 2.

[0454] In some embodiments, the anti-TCRβV antibody molecule, e.g., anti-TCRβ V12 antibody molecule includes at least one, two, or three CDRs according to Chothia et al. (e.g., at least one, two, or three CDRs according to the Chothia definition as set out in Table 2) from a light chain variable region of an antibody described herein, e.g., an antibody as described in Table 2, or a sequence substantially identical (e.g., at least 80%, 85%, 90%, 92%, 95%, 97%, 98%, 99% or higher identical) to any of the aforesaid sequences; or which have at least one amino acid alteration, but not more than two, three or four alterations (e.g., substitutions, deletions, or insertions, e.g., conservative substitutions) relative to one, two, or three CDRs according to Chothia et al. shown in Table 2.

[0455] In some embodiments, the anti-TCRβV antibody molecule, e.g., anti-TCRβ V12 antibody molecule includes at least one, two, three, four, five, or six CDRs according to Chothia et al. (e.g., at least one, two, three, four, five, or six CDRs according to the Chothia definition as set out in Table 2) from the heavy and light chain variable regions of an antibody described herein, e.g., an antibody as described in Table 2, or encoded by the nucleotide sequence in Table 2; or a sequence substantially identical (e.g., at least 80%, 85%, 90%, 92%, 95%, 97%, 98%, 99% or higher identical) to any of the aforesaid sequences; or which have at least one amino acid alteration, but not more than two, three or four alterations (e.g., substitutions, deletions, or insertions, e.g., conservative substitutions) relative to one, two, three, four, five, or six CDRs according to Chothia et al. shown in Table 2.

[0456] In some embodiments, the anti-TCRβV antibody molecule, e.g., anti-TCRβ V12 antibody molecule includes all six CDRs according to Chothia et al. (e.g., all six CDRs according to the Chothia definition as set out in Table 2) from the heavy and light chain variable regions of an antibody described herein, e.g., an antibody as described in Table 2, or encoded by the nucleotide sequence in Table 2; or encoded by the nucleotide sequence in Table 2; or a sequence substantially identical (e.g., at least 80%, 85%, 90%, 92%, 95%, 97%, 98%, 99% or higher identical) to any of the aforesaid sequences; or which have at least one amino acid alteration, but not more than two, three or four alterations (e.g., substitutions, deletions, or insertions, e.g., conservative substitutions) relative to all six CDRs according to Chothia et al. shown in Table 2. In some embodiments, the anti-TCRβV antibody molecule, e.g., anti-TCRβ V12 antibody molecule may include any CDR described herein.

[0457] In some embodiments, the anti-TCRβV antibody molecule, e.g., anti-TCRβ V12 antibody molecule includes at least one, two, or three CDRs according to a combined CDR (e.g., at least one, two, or three CDRs according to the combined CDR definition as set out in Table 2) from a heavy chain variable region of an antibody described herein, e.g., an antibody chosen as described in Table 2, or a sequence substantially identical (e.g., at least 80%, 85%, 90%, 92%, 95%, 97%, 98%, 99% or higher identical) to any of the aforesaid sequences; or which have at least one amino acid alteration, but not more than two, three or four alterations (e.g., substitutions, deletions, or insertions, e.g., conservative substitutions) relative to one, two, or three CDRs according to combined CDR shown in Table 2.

[0458] In some embodiments, the anti-TCRβV antibody molecule, e.g., anti-TCRβ V12 antibody molecule includes at least one, two, or three CDRs according to a combined CDR (e.g., at least one, two, or three CDRs according to the combined CDR definition as set out in Table 2) from a light chain variable region of an antibody described herein, e.g., an antibody as described in Table 2, or a sequence substantially identical (e.g., at least 80%, 85%, 90%, 92%, 95%, 97%, 98%, 99% or higher identical) to any of the aforesaid sequences; or which have at least one amino acid alteration, but not more than two, three or four alterations (e.g., substitutions, deletions, or insertions, e.g., conservative substitutions) relative to one, two, or three CDRs according to a combined CDR shown in Table 2.

[0459] In some embodiments, the anti-TCRβV antibody molecule, e.g., anti-TCRβ V12 antibody molecule includes at least one, two, three, four, five, or six CDRs according to a combined CDR. (e.g., at least one, two, three, four, five, or six CDRs according to the combined CDR definition as set out in Table 2) from the heavy and light chain variable regions of an antibody described herein, e.g., an antibody as described in Table 2, or encoded by the nucleotide sequence in Table 2; or a sequence substantially identical (e.g., at least 80%, 85%, 90%, 92%, 95%, 97%, 98%, 99% or higher identical) to any of the aforesaid sequences; or which have at least one amino acid alteration, but not more than two, three or four alterations (e.g., substitutions, deletions, or insertions, e.g., conservative substitutions) relative to one, two, three, four, five, or six CDRs according to a combined CDR shown in Table 2.

[0460] In some embodiments, the anti-TCRβV antibody molecule, e.g., anti-TCRβ V12 antibody molecule includes all six CDRs according to a combined CDR (e.g., all six CDRs according to the combined CDR definition as set out in Table 2) from the heavy and light chain variable regions of an antibody described herein, e.g., an antibody as described in Table 2, or encoded by the nucleotide sequence in Table 2; or encoded by the nucleotide sequence in Table 2; or a sequence substantially identical (e.g., at least 80%, 85%, 90%, 92%, 95%, 97%, 98%, 99% or higher identical) to any of the aforesaid sequences; or which have at least one amino acid alteration, but not more than two, three or four alterations (e.g., substitutions, deletions, or insertions, e.g., conservative substitutions) relative to all six CDRs according to a combined CDR shown in Table 2. In some embodiments, the anti-TCRβV antibody molecule, e.g., anti-TCRβ V12 antibody molecule may include any CDR described herein.

[0461] In some embodiments, a combined CDR as set out in Table 1 is a CDR that comprises a Kabat CDR and a Chothia CDR.

[0462] In some embodiments, the anti-TCRβV antibody molecule, e e.g., anti-TCRβ V12 antibody molecule, molecule includes a combination of CDRs or hypervariable loops identified as combined CDRs in Table 1. In some embodiments, the anti-TCRβV antibody molecule, e.g., anti-TCRβ V12 antibody molecule, can contain any combination of CDRs or hypervariable loops according the “combined” CDRs are described in Table 1.

[0463] In some embodiments, the anti-TCRβV antibody molecule, e.g., anti-TCRβ V12 antibody molecule includes a combination of CDRs or hypervariable loops defined according to the Kabat et al. and Chothia et al., or as described in Table 1.

[0464] In some embodiments, the anti-TCRβV antibody molecule, e.g., anti-TCRβ V12 antibody molecule can contain any combination of CDRs or hypervariable loops according to the Kabat and Chothia definitions.

[0465] In some embodiments, e.g., an embodiment comprising a variable region, a CDR (e.g., a combined CDR, Chothia CDR or Kabat CDR), or other sequence referred to herein, e.g., in Table 2, the antibody molecule is a monospecific antibody molecule, a bispecific antibody molecule, a bivalent antibody molecule, a biparatopic antibody molecule, or an antibody molecule that comprises an antigen binding fragment of an antibody, e.g., a half antibody or antigen binding fragment of a half antibody. In certain embodiments the antibody molecule comprises a TCR targeting molecule, e.g., a bispecific molecule, e.g., as described herein.

[0466] In some embodiments, the anti-TCRβV antibody molecule, e.g., anti-TCRβ V12 antibody molecule includes: (i) one, two or all of a light chain complementarity determining region 1 (LC CDR1), a light chain complementarity determining region 2 (LC CDR2), and a light chain complementarity determining region 3 (LC CDR3) of SEQ ID NO: 16, SEQ ID NO: 26, SEQ ID NO: 27, SEQ ID NO: 28, SEQ ID NO: 29 or SEQ ID NO: 30, and/or (ii) one, two or all of a heavy chain complementarity determining region 1 (HC CDR1), heavy chain complementarity determining region 2 (HC CDR2), and a heavy chain complementarity determining region 3 (HC CDR3) of SEQ ID NO: 15, SEQ ID NO: 23, SEQ ID NO: 24 or SEQ ID NO: 25.

[0467] In some embodiments, the anti-TCRβV antibody molecule, e.g., anti-TCRβ V12 antibody molecule comprises: (i) a LC CDR1 amino acid sequence of SEQ ID NO: 20, a LC CDR2 amino acid sequence of SEQ ID NO: 21, or a LC CDR3 amino acid sequence of SEQ ID NO: 22; and/or (ii) a HC CDR1 amino acid sequence of SEQ ID NO: 17, a HC CDR2 amino acid sequence of SEQ ID NO: 18, or a HC CDR3 amino acid sequence of SEQ ID NO: 19.

[0468] In some embodiments, the anti-TCRβV antibody molecule, e.g., anti-TCRβ V12 antibody molecule comprises: (i) a light chain variable region (VL) comprising a LC CDR1 amino acid sequence of SEQ ID NO: 20, a LC CDR2 amino acid sequence of SEQ ID NO: 21, and a LC CDR3 amino acid sequence of SEQ ID NO: 2; and/or (ii) a heavy chain variable region (VH) comprising a HC CDR1 amino acid sequence of SEQ ID NO: 17, a HC CDR2 amino acid sequence of SEQ ID NO: 18, and a HC CDR3 amino acid sequence of SEQ ID NO: 19.

[0469] In some embodiments, the anti-TCRβV antibody molecule, e.g., anti-TCRβ V12 antibody molecule comprises: (i) a LC CDR1 amino acid sequence of SEQ ID NO: 63, a LC CDR2 amino acid sequence of SEQ ID NO: 64, or a LC CDR3 amino acid sequence of SEQ ID NO: 65; and/or (ii) a HC CDR1 amino acid sequence of SEQ ID NO: 57, a HC CDR2 amino acid sequence of SEQ ID NO: 58, or a HC CDR3 amino acid sequence of SEQ ID NO: 59.

[0470] In some embodiments, the anti-TCRβV antibody molecule, e.g., anti-TCRβ V12 antibody molecule comprises: (i) a light chain variable region (VL) comprising a LC CDR1 amino acid sequence of SEQ ID NO: 63, a LC CDR2 amino acid sequence of SEQ ID NO: 64, or a LC CDR3 amino acid sequence of SEQ ID NO: 65; and/or (ii) a heavy chain variable region (VH) comprising a HC CDR1 amino acid sequence of SEQ ID NO: 57, a HC CDR2 amino acid sequence of SEQ ID NO: 58, or a HC CDR3 amino acid sequence of SEQ ID NO: 59.

[0471] In some embodiments, the anti-TCRβV antibody molecule, e.g., anti-TCRβ V12 antibody molecule comprises: (i) a LC CDR1 amino acid sequence of SEQ ID NO: 66, a LC CDR2 amino acid sequence of SEQ ID NO: 67, or a LC CDR3 amino acid sequence of SEQ ID NO: 68; and/or (ii) a HC CDR1 amino acid sequence of SEQ ID NO: 60, a HC CDR2 amino acid sequence of SEQ ID NO: 61, or a HC CDR3 amino acid sequence of SEQ ID NO: 62.

[0472] In some embodiments, the anti-TCRβV antibody molecule, e.g., anti-TCRβ V12 antibody molecule comprises: (i) a light chain variable region (VL) comprising a LC CDR1 amino acid sequence of SEQ ID NO: 63, a LC CDR2 amino acid sequence of SEQ ID NO: 64, or a LC CDR3 amino acid sequence of SEQ ID NO: 65; and/or (ii) a heavy chain variable region (VH) comprising a HC CDR1 amino acid sequence of SEQ ID NO: 57, a HC CDR2 amino acid sequence of SEQ ID NO: 58, or a HC CDR3 amino acid sequence of SEQ ID NO: 59.

[0473] In some embodiments, the light or the heavy chain variable framework (e.g., the region encompassing at least FRI, FR2, FR3, and optionally FR4) of the anti-TCRβV antibody molecule, e.g., anti-TCRβ V12 antibody molecule can be chosen from: (a) a light or heavy chain variable framework including at least 80%, 85%, 87% 90%, 92%, 93%, 95%, 97%, 98%, or 100% of the amino acid residues from a human light or heavy chain variable framework, e.g., a light or heavy chain variable framework residue from a human mature antibody, a human germline sequence, or a human consensus sequence; (b) a light or heavy chain variable framework including from 20% to 80%, 40% to 60%, 60% to 90%, or 70% to 95% of the amino acid residues from a human light or heavy chain variable framework, e.g., a light or heavy chain variable framework residue from a human mature antibody, a human germline sequence, or a human consensus sequence; (c) a non-human framework (e.g., a rodent framework); or (d) a non-human framework that has been modified, e.g., to remove antigenic or cytotoxic determinants, e.g., deimmunized, or partially humanized. In some embodiments, the light or heavy chain variable framework region (particularly FRI, FR2 and/or FR3) includes a light or heavy chain variable framework sequence at least 70, 75, 80, 85, 87, 88, 90, 92, 94, 95, 96, 97, 98, 99% identical or identical to the frameworks of a VL or VH segment of a human germline gene.

[0474] In some embodiments, the anti-TCRβV antibody molecule, e.g., anti-TCRβ V12 antibody molecule, comprises a heavy chain variable domain having at least one, two, three, four, five, six, seven, ten, fifteen, twenty or more changes, e.g., amino acid substitutions or deletions, from an amino acid sequence described in Table 2 e.g., the amino acid sequence of the FR region in the entire variable region, e.g., SEQ ID NOs: 23-25.

[0475] Alternatively, or in combination with the heavy chain substitutions described herein the anti-TCRβV antibody molecule, e.g., anti-TCRβ V12 antibody molecule comprises a light chain variable domain having at least one, two, three, four, five, six, seven, ten, fifteen, twenty or more amino acid changes, e.g., amino acid substitutions or deletions, from an amino acid sequence of an antibody described herein .e.g., the amino acid sequence of the FR region in the entire variable region, e.g., SEQ ID NOs: 26-30.

[0476] In some embodiments, the anti-TCRβV antibody molecule, e.g., anti-TCRβ V12 antibody molecule includes one, two, three, or four heavy chain framework regions, or a sequence substantially identical thereto.

[0477] In some embodiments, the anti-TCRβV antibody molecule, e.g., anti-TCRβ V12 antibody molecule includes one, two, three, or four light chain framework regions, or a sequence substantially identical thereto. In some embodiments, the anti-TCRβV antibody molecule, e.g., anti-TCRβ V12 antibody molecule comprises the light chain framework region 1. In some embodiments, the anti-TCRβV antibody molecule, e.g., anti-TCRβ V12 antibody molecule comprises the light chain framework region 2. In some embodiments, the anti-TCRβV antibody molecule, e.g., anti-TCRβ V12 antibody molecule comprises the light chain framework region 3. In some embodiments, the anti-TCRβV antibody molecule, e.g., anti-TCRβ V12 antibody molecule comprises the light chain framework region 4.

[0478] In some embodiments, the anti-TCRβV antibody molecule, e.g., anti-TCRβ V12 antibody molecule comprises a light chain comprising a framework region, e.g., framework region 1 (FRI), comprising a change, e.g., a substitution (e.g., a conservative substitution) at one or more, e.g., all, position as described herein according to Kabat numbering. In some embodiments, FR1 comprises an Aspartic Acid at position 1, e.g., a substitution at position 1 according to Kabat numbering, e.g., an Alanine to Aspartic Acid substitution. In some embodiments, FRI comprises an Asparagine at position 2, e.g., a substitution at position 2 according to Kabat numbering, e.g., an Isoleucine to Asparagine substitution, Serine to Asparagine substitution or Tyrosine to Asparagine substitution. In some embodiments, FRI comprises a Leucine at position 4, e.g., a substitution at position 4 according to Kabat numbering, e.g., a Methionine to Leucine substitution.

[0479] In some embodiments, the anti-TCRβV antibody molecule, e.g., anti-TCRβ V12 antibody molecule comprises a light chain comprising a framework region, e.g., framework region 1 (FRI), comprising a substitution at position 1 according to Kabat numbering, e.g., an Alanine to Aspartic Acid substitution, a substitution at position 2 according to Kabat numbering, e.g., an Isoleucine to Asparagine substitution, Serine to Asparagine substitution or Tyrosine to Asparagine substitution, and a substitution at position 4 according to Kabat numbering, e.g., a Methionine to Leucine substitution. In some embodiments, the anti-TCRβV antibody molecule, e.g., anti-TCRβ V12 antibody molecule comprises a light chain comprising a framework region, e.g., framework region 1 (FRI), comprising a substitution at position 1 according to Kabat numbering, e.g., an Alanine to Aspartic Acid substitution, and a substitution at position 2 according to Kabat numbering, e.g., an Isoleucine to Asparagine substitution, Serine to Asparagine substitution or Tyrosine to Asparagine substitution. In some embodiments, the anti-TCRβV antibody molecule, e.g., anti-TCRβ V12 antibody molecule comprises a light chain comprising a framework region, e.g., framework region 1 (FRI), comprising a substitution at position 1 according to Kabat numbering, e.g., an Alanine to Aspartic Acid substitution, and a substitution at position 4 according to Kabat numbering, e.g., a Methionine to Leucine substitution. In some embodiments, the anti-TCRβV antibody molecule, e.g., anti-TCRβ V12 antibody molecule comprises a light chain comprising a framework region, e.g., framework region 1 (FRI), comprising a substitution at position 2 according to Kabat numbering, e.g., an Isoleucine to Asparagine substitution, Serine to Asparagine substitution or Tyrosine to Asparagine substitution, and a substitution at position 4 according to Kabat numbering, e.g., a Methionine to Leucine substitution. In some embodiments, the substitution is relative to a human germline light chain framework region sequence.

[0480] In some embodiments, the anti-TCRβV antibody molecule, e.g., anti-TCRβ V12 antibody molecule comprises a light chain comprising a framework region, e.g., framework region 3 (FR3), comprising a change, e.g., a substitution (e.g., a conservative substitution) at one or more, e.g., all, position as described herein according to Kabat numbering. In some embodiments, FR3 comprises a Glycine at position 66, e.g., a substitution at position 66 according to Kabat numbering, e.g., a Lysine to Glycine substitution, or a Serine to Glycine substitution. In some embodiments, FR3 comprises an Asparagine at position 69, e.g., a substitution at position 69 according to Kabat numbering, e.g., a Tyrosine to Asparagine substitution. In some embodiments, FR3 comprises a Tyrosine at position 71, e.g., a substitution at position 71 according to Kabat numbering, e.g., a Phenylalanine to Tyrosine substitution, or an Alanine to Tyrosine substitution.

[0481] In some embodiments, the anti-TCRβV antibody molecule, e.g., anti-TCRβ V12 antibody molecule comprises a light chain comprising a framework region, e.g., framework region 3 (FR3), comprising a substitution at position 66 according to Kabat numbering, e.g., a Lysine to Glycine substitution, or a Serine to Glycine substitution, and a substitution at position 69 according to Kabat numbering, e.g., a Tyrosine to Asparagine substitution. In some embodiments, the anti-TCRβV antibody molecule, e.g., anti-TCRβ V12 antibody molecule comprises a light chain comprising a framework region, e.g., framework region 3 (FR3), comprising a substitution at position 66 according to Kabat numbering, e.g., Lysine to Glycine substitution, or a Serine to Glycine substitution, and a substitution at position 71 according to Kabat numbering, e.g., a Phenylalanine to Tyrosine substitution, or an Alanine to Tyrosine substitution. In some embodiments, the anti-TCRβV antibody molecule, e.g., anti-TCRβ V12 antibody molecule comprises a light chain comprising a framework region, e.g., framework region 3 (FR3), comprising a substitution at position 69 according to Kabat numbering, e.g., a Tyrosine to Asparagine substitution and a substitution at position 71 according to Kabat numbering, e.g., a Phenylalanine to Tyrosine substitution, or an Alanine to Tyrosine substitution. In some embodiments, the anti-TCRβV antibody molecule, e.g., anti-TCRβ V12 antibody molecule comprises a light chain comprising a framework region, e.g., framework region 3 (FR3), comprising a substitution at position 66 according to Kabat numbering, e.g., a Lysine to Glycine substitution, or a Serine to Glycine substitution, a substitution at position 69 according to Kabat numbering, e.g., a Tyrosine to Asparagine substitution and a substitution at position 71 according to Kabat numbering, e.g., a Phenylalanine to Tyrosine substitution, or an Alanine to Tyrosine substitution. In some embodiments, the substitution is relative to a human germline light chain framework region sequence.

[0482] In some embodiments, the anti-TCRβV antibody molecule, e.g., anti-TCRβ V12 antibody molecule comprises a light chain comprising: a framework region 1 (FRI) comprising a substitution at position 2 according to Kabat numbering, e.g., a Isoleucine to Asparagine substitution; and a framework region 3 (FR3), comprising a substitution at position 69 according to Kabat numbering, e.g., a Threonine to Asparagine substitution and a substitution at position 71 according to Kabat numbering, e.g., a Phenylalanine to Tyrosine substitution, e.g., as shown in the amino acid sequence of SEQ ID NO: 26. In some embodiments, the substitution is relative to a human germline light chain framework region sequence.

[0483] In some embodiments, the anti-TCRβV antibody molecule, e.g., anti-TCRβ V12 antibody molecule comprises a light chain comprising: (a) a framework region 1 (FRI) comprising a substitution at position 1 according to Kabat numbering, e.g., a Alanine to Aspartic Acid substitution, and a substitution at position 2 according to Kabat numbering, e.g., a Isoleucine to Asparagine substitution; and (b) a framework region 3 (FR3), comprising a substitution at position 69 according to Kabat numbering, e.g., a Threonine to Asparagine substitution and a substitution at position 71 according to Kabat numbering, e.g., a Phenylalanine to Tyrosine substitution, e.g., as shown in the amino acid sequence of SEQ ID NO: 27 In some embodiments, the substitution is relative to a human germline light chain framework region sequence.

[0484] In some embodiments, the anti-TCRβV antibody molecule, e.g., anti-TCRβ V12 antibody molecule comprises a light chain comprising: (a) a framework region 1 (FRI) comprising a substitution at position 2 according to Kabat numbering, e.g., a Serine to Asparagine substitution; and a substitution at position 4 according to Kabat numbering, e.g., a Methionine to Leucine substitution; and (b) a framework region 3 (FR3), comprising a substitution at position 69 according to Kabat numbering, e.g., a Threonine to Asparagine substitution and a substitution at position 71 according to Kabat numbering, e.g., a Phenylalanine to Tyrosine substitution, e.g., as shown in the amino acid sequence of SEQ ID NO: 28 In some embodiments, the substitution is relative to a human germline light chain framework region sequence.

[0485] In some embodiments, the anti-TCRβV antibody molecule, e.g., anti-TCRβ V12 antibody molecule comprises a light chain comprising: (a) a framework region 1 (FRI) comprising a substitution at position 2 according to Kabat numbering, e.g., a Serine to Asparagine substitution; and (b) a framework region 3 (FR3) comprising a substitution at position 66 according to Kabat numbering, e.g., a Lysine to Glycine substitution; a substitution at position 69 according to Kabat numbering, e.g., a Threonine to Asparagine substitution; and a substitution at position 71 according to Kabat numbering, e.g., a Alanine to Tyrosine substitution, e.g., as shown in the amino acid sequence of SEQ ID NO: 29. In some embodiments, the substitution is relative to a human germline light chain framework region sequence.

[0486] In some embodiments, the anti-TCRβV antibody molecule, e.g., anti-TCRβ V12 antibody molecule comprises a light chain comprising: (a) a framework region 1 (FRI) comprising a substitution at position 2 according to Kabat numbering, e.g., a Tyrosine to Asparagine substitution; and (b) a framework region 3 (FR3) comprising a substitution at position 66 according to Kabat numbering, e.g., a Serine to Glycine substitution; a substitution at position 69 according to Kabat numbering, e.g., a Threonine to Asparagine substitution; and a substitution at position 71 according to Kabat numbering, e.g., a Alanine to Tyrosine substitution, e.g., as shown in the amino acid sequence of SEQ ID NO: 29. In some embodiments, the substitution is relative to a human germline light chain framework region sequence.

[0487] In some embodiments, the anti-TCRβV antibody molecule, e.g., anti-TCRβ V12 antibody molecule comprises a light chain variable domain comprising: (a) a framework region 1 (FRI) comprising a change, e.g., a substitution (e.g., a conservative substitution) at one or more (e.g., all) positions as described herein according to Kabat numbering, and (b) a framework region 3 (FR3) comprising a change, e.g., a substitution (e.g., a conservative substitution) at one or more (e.g., all) position as described herein according to Kabat numbering. In some embodiments, the substitution is relative to a human germline light chain framework region sequence.

[0488] In some embodiments, the anti-TCRβV antibody molecule, e.g., anti-TCRβ V12 antibody molecule comprises the heavy chain framework region 1. In some embodiments, the anti-TCRβV antibody molecule, e.g., anti-TCRβ V12 antibody molecule comprises the heavy chain framework region 2. In some embodiments, the anti-TCRβV antibody molecule, e.g., anti-TCRβ V12 antibody molecule comprises the heavy chain framework region 3. In some embodiments, the anti-TCRβV antibody molecule, e.g., anti-TCRβ V12 antibody molecule comprises the heavy chain framework region 4. In some embodiments, the anti-TCRβV antibody molecule, e.g., anti-TCRβ V12 antibody molecule comprises the heavy chain framework regions 1-4, e.g., SEQ ID NOS: 20-23. In some embodiments, the anti-TCRβV antibody molecule, e.g., anti-TCRβ V12 antibody molecule comprises the light chain framework regions 1-4, e.g., SEQ ID NOs: 26-30.

[0489] In some embodiments, the anti-TCRβV antibody molecule, e.g., anti-TCRβ V12 antibody molecule comprises the heavy chain framework regions 1-4, e.g., SEQ ID NOs: 23-25; and the light chain framework regions 1-4, e.g., SEQ ID NOs: 26-30.

[0490] In some embodiments, the heavy or light chain variable domain, or both, of, the anti-TCRβV antibody molecule, e.g., anti-TCRβ V12 antibody molecule includes an amino acid sequence, which is substantially identical to an amino acid as described herein, e.g., at least 80%, 85%, 90%, 92%, 95%, 97%, 98%, 99% or higher identical to a variable region of an antibody described herein, e.g., an antibody as described in Table 2, or encoded by the nucleotide sequence in Table 2; or which differs at least 1 or 5 residues, but less than 40, 30, 20, or 10 residues, from a variable region of an antibody described herein.

[0491] In some embodiments, the anti-TCRβV antibody molecule, e.g., anti-TCRβ V12 antibody molecule comprises at least one, two, three, or four antigen-binding regions, e.g., variable regions, having an amino acid sequence as set forth in Table 2, or a sequence substantially identical thereto (e.g., a sequence at least about 85%, 90%, 95%, 99% or more identical thereto, or which differs by no more than 1, 2, 5, 10, or 15 amino acid residues from the sequences shown in Table 2. In another embodiment, the anti-TCRβV antibody molecule, e.g., anti-TCRβ V12 antibody molecule includes a VH and/or VL domain encoded by a nucleic acid having a nucleotide sequence as set forth in Table 2, or a sequence substantially identical thereto (e.g., a sequence at least about 85%, 90%, 95%, 99% or more identical thereto, or which differs by no more than 3, 6, 15, 30, or 45 nucleotides from the sequences shown in Table 2.

[0492] In some embodiments, the anti-TCRβV antibody molecule, e.g., anti-TCRβ V12 antibody molecule comprises: a VH domain comprising an amino acid sequence chosen from the amino acid sequence of SEQ ID NO: 23, SEQ ID NO:24 or SEQ ID NO:25, an amino acid sequence at least about 85%, 90%, 95%, 99% or more identical to the amino acid sequence SEQ ID NO: 23, SEQ ID NO:24 or SEQ ID NO:25, or an amino acid sequence which differs by no more than 1, 2, 5, 10, or 15 amino acid residues from the amino acid sequence of SEQ ID NO: 23, SEQ ID NO:24 or SEQ ID NO:25; and/or a VL domain comprising an amino acid sequence chosen from the amino acid sequence of SEQ ID NO: 26, SEQ ID NO: 27, SEQ ID NO: 28, SEQ ID NO: 29 or SEQ ID NO: 30, an amino acid sequence at least about 85%, 90%, 95%, 99% or more identical to the amino acid sequence of SEQ ID NO: 26, SEQ ID NO: 27, SEQ ID NO: 28, SEQ ID NO: 29 or SEQ ID NO: 30, or an amino acid sequence which differs by no more than 1, 2, 5, 10, or 15 amino acid residues from the amino acid sequence of SEQ ID NO: 26, SEQ ID NO: 27, SEQ ID NO: 28, SEQ ID NO: 29 or SEQ ID NO: 30. In some embodiments, the anti-TCRβV antibody molecule, e.g., anti-TCRβ V12 antibody molecule comprises: a VH domain comprising the amino acid sequence of SEQ ID NO: 23, an amino acid sequence at least about 85%, 90%, 95%, 99% or more identical to the amino acid sequence SEQ ID NO: 23, or an amino acid sequence which differs by no more than 1, 2, 5, 10, or 15 amino acid residues from the amino acid sequence of SEQ ID NO: 23; and a VL domain comprising the amino acid sequence of SEQ ID NO: 26, an amino acid sequence at least about 85%, 90%, 95%, 99% or more identical to the amino acid sequence SEQ ID NO: 26, or an amino acid sequence which differs by no more than 1, 2, 5, 10, or 15 amino acid residues from the amino acid sequence of SEQ ID NO: 26.

[0493] In some embodiments, the anti-TCRβV antibody molecule, e.g., anti-TCRβ V12 antibody molecule comprises: a VH domain comprising the amino acid sequence of SEQ ID NO: 23, an amino acid sequence at least about 85%, 90%, 95%, 99% or more identical to the amino acid sequence SEQ ID NO: 23, or an amino acid sequence which differs by no more than 1, 2, 5, 10, or 15 amino acid residues from the amino acid sequence of SEQ ID NO: 23; and a VL domain comprising the amino acid sequence of SEQ ID NO: 27, an amino acid sequence at least about 85%, 90%, 95%, 99% or more identical to the amino acid sequence SEQ ID NO: 27, or an amino acid sequence which differs by no more than 1, 2, 5, 10, or 15 amino acid residues from the amino acid sequence of SEQ ID NO: 27.

[0494] In some embodiments, the anti-TCRβV antibody molecule, e.g., anti-TCRβ V12 antibody molecule comprises: a VH domain comprising the amino acid sequence of SEQ ID NO: 23, an amino acid sequence at least about 85%, 90%, 95%, 99% or more identical to the amino acid sequence SEQ ID NO: 23, or an amino acid sequence which differs by no more than 1, 2, 5, 10, or 15 amino acid residues from the amino acid sequence of SEQ ID NO: 23; and a VL domain comprising the amino acid sequence of SEQ ID NO: 28, an amino acid sequence at least about 85%, 90%, 95%, 99% or more identical to the amino acid sequence SEQ ID NO: 28, or an amino acid sequence which differs by no more than 1, 2, 5, 10, or 15 amino acid residues from the amino acid sequence of SEQ ID NO: 28.

[0495] In some embodiments, the anti-TCRβV antibody molecule, e.g., anti-TCRβ V12 antibody molecule comprises: a VH domain comprising the amino acid sequence of SEQ ID NO: 23, an amino acid sequence at least about 85%, 90%, 95%, 99% or more identical to the amino acid sequence SEQ ID NO: 23, or an amino acid sequence which differs by no more than 1, 2, 5, 10, or 15 amino acid residues from the amino acid sequence of SEQ ID NO: 23; and a VL domain comprising the amino acid sequence of SEQ ID NO: 29, an amino acid sequence at least about 85%, 90%, 95%, 99% or more identical to the amino acid sequence SEQ ID NO: 29, or an amino acid sequence which differs by no more than 1, 2, 5, 10, or 15 amino acid residues from the amino acid sequence of SEQ ID NO: 29.

[0496] In some embodiments, the anti-TCRβV antibody molecule, e.g., anti-TCRβ V12 antibody molecule comprises: a VH domain comprising the amino acid sequence of SEQ ID NO: 23, an amino acid sequence at least about 85%, 90%, 95%, 99% or more identical to the amino acid sequence SEQ ID NO: 23, or an amino acid sequence which differs by no more than 1, 2, 5, 10, or 15 amino acid residues from the amino acid sequence of SEQ ID NO: 23; and a VL domain comprising the amino acid sequence of SEQ ID NO: 30, an amino acid sequence at least about 85%, 90%, 95%, 99% or more identical to the amino acid sequence SEQ ID NO: 30, or an amino acid sequence which differs by no more than 1, 2, 5, 10, or 15 amino acid residues from the amino acid sequence of SEQ ID NO: 30.

[0497] In some embodiments, the anti-TCRβV antibody molecule, e.g., anti-TCRβ V12 antibody molecule comprises: a VH domain comprising the amino acid sequence of SEQ ID NO: 24 or 25, an amino acid sequence at least about 85%, 90%, 95%, 99% or more identical to the amino acid sequence SEQ ID NO: 24 or 25, or an amino acid sequence which differs by no more than 1, 2, 5, 10, or 15 amino acid residues from the amino acid sequence of SEQ ID NO: 24 or 25; and a VL domain comprising the amino acid sequence of SEQ ID NO: 26, an amino acid sequence at least about 85%, 90%, 95%, 99% or more identical to the amino acid sequence SEQ ID NO: 26, or an amino acid sequence which differs by no more than 1, 2, 5, 10, or 15 amino acid residues from the amino acid sequence of SEQ ID NO: 26.

[0498] In some embodiments, the anti-TCRβV antibody molecule, e.g., anti-TCRβ V12 antibody molecule comprises: a VH domain comprising the amino acid sequence of SEQ ID NO: 24 or 25, an amino acid sequence at least about 85%, 90%, 95%, 99% or more identical to the amino acid sequence SEQ ID NO: 24 or 25, or an amino acid sequence which differs by no more than 1, 2, 5, 10, or 15 amino acid residues from the amino acid sequence of SEQ ID NO: 24 or 25; and a VL domain comprising the amino acid sequence of SEQ ID NO: 27, an amino acid sequence at least about 85%, 90%, 95%, 99% or more identical to the amino acid sequence SEQ ID NO: 27, or an amino acid sequence which differs by no more than 1, 2, 5, 10, or 15 amino acid residues from the amino acid sequence of SEQ ID NO: 27.

[0499] In some embodiments, the anti-TCRβV antibody molecule, e.g., anti-TCRβ V12 antibody molecule comprises: a VH domain comprising the amino acid sequence of SEQ ID NO: 24 or 25, an amino acid sequence at least about 85%, 90%, 95%, 99% or more identical to the amino acid sequence SEQ ID NO: 24 or 25, or an amino acid sequence which differs by no more than 1, 2, 5, 10, or 15 amino acid residues from the amino acid sequence of SEQ ID NO: 24 or 25; and a VL domain comprising the amino acid sequence of SEQ ID NO: 28, an amino acid sequence at least about 85%, 90%, 95%, 99% or more identical to the amino acid sequence SEQ ID NO: 28, or an amino acid sequence which differs by no more than 1, 2, 5, 10, or 15 amino acid residues from the amino acid sequence of SEQ ID NO: 28.

[0500] In some embodiments, the anti-TCRβV antibody molecule, e.g., anti-TCRβ V12 antibody molecule comprises: a VH domain comprising the amino acid sequence of SEQ ID NO: 24 or 25, an amino acid sequence at least about 85%, 90%, 95%, 99% or more identical to the amino acid sequence SEQ ID NO: 24 or 25, or an amino acid sequence which differs by no more than 1, 2, 5, 10, or 15 amino acid residues from the amino acid sequence of SEQ ID NO: 24 or 25; and a VL domain comprising the amino acid sequence of SEQ ID NO: 29, an amino acid sequence at least about 85%, 90%, 95%, 99% or more identical to the amino acid sequence SEQ ID NO: 29, or an amino acid sequence which differs by no more than 1, 2, 5, 10, or 15 amino acid residues from the amino acid sequence of SEQ ID NO: 29.

[0501] In some embodiments, the anti-TCRβV antibody molecule, e.g., anti-TCRβ V12 antibody molecule comprises: a VH domain comprising the amino acid sequence of SEQ ID NO: 24 or 25, an amino acid sequence at least about 85%, 90%, 95%, 99% or more identical to the amino acid sequence SEQ ID NO: 24 or 25, or an amino acid sequence which differs by no more than 1, 2, 5, 10, or 15 amino acid residues from the amino acid sequence of SEQ ID NO: 24 or 25; and a VL domain comprising the amino acid sequence of SEQ ID NO: 30, an amino acid sequence at least about 85%, 90%, 95%, 99% or more identical to the amino acid sequence SEQ ID NO: 30, or an amino acid sequence which differs by no more than 1, 2, 5, 10, or 15 amino acid residues from the amino acid sequence of SEQ ID NO: 30.

[0502] In some embodiments, the anti-TCRβV antibody molecule, e.g., anti-TCRβ V12 antibody molecule comprises: a VH domain comprising the amino acid sequence of SEQ ID NO: 25 or 23, an amino acid sequence at least about 85%, 90%, 95%, 99% or more identical to the amino acid sequence SEQ ID NO: 25 or 23, or an amino acid sequence which differs by no more than 1, 2, 5, 10, or 15 amino acid residues from the amino acid sequence of SEQ ID NO: 25 or 23; and a VL domain comprising the amino acid sequence of SEQ ID NO: 26, an amino acid sequence at least about 85%, 90%, 95%, 99% or more identical to the amino acid sequence SEQ ID NO: 26, or an amino acid sequence which differs by no more than 1, 2, 5, 10, or 15 amino acid residues from the amino acid sequence of SEQ ID NO: 26.

[0503] In some embodiments, the anti-TCRβV antibody molecule, e.g., anti-TCRβ V12 antibody molecule comprises: a VH domain comprising the amino acid sequence of SEQ ID NO: 25 or 23, an amino acid sequence at least about 85%, 90%, 95%, 99% or more identical to the amino acid sequence SEQ ID NO: 25 or 23, or an amino acid sequence which differs by no more than 1, 2, 5, 10, or 15 amino acid residues from the amino acid sequence of SEQ ID NO: 25 or 23; and a VL domain comprising the amino acid sequence of SEQ ID NO: 27, an amino acid sequence at least about 85%, 90%, 95%, 99% or more identical to the amino acid sequence SEQ ID NO: 27, or an amino acid sequence which differs by no more than 1, 2, 5, 10, or 15 amino acid residues from the amino acid sequence of SEQ ID NO: 27.

[0504] In some embodiments, the anti-TCRβV antibody molecule, e.g., anti-TCRβ V12 antibody molecule comprises: a VH domain comprising the amino acid sequence of SEQ ID NO: 25 or 23, an amino acid sequence at least about 85%, 90%, 95%, 99% or more identical to the amino acid sequence SEQ ID NO: 25 or 23, or an amino acid sequence which differs by no more than 1, 2, 5, 10, or 15 amino acid residues from the amino acid sequence of SEQ ID NO: 25 or 23; and a VL domain comprising the amino acid sequence of SEQ ID NO: 28, an amino acid sequence at least about 85%, 90%, 95%, 99% or more identical to the amino acid sequence SEQ ID NO: 28, or an amino acid sequence which differs by no more than 1, 2, 5, 10, or 15 amino acid residues from the amino acid sequence of SEQ ID NO: 28.

[0505] In some embodiments, the anti-TCRβV antibody molecule, e.g., anti-TCRβ V12 antibody molecule comprises: a VH domain comprising the amino acid sequence of SEQ ID NO: 25 or 23, an amino acid sequence at least about 85%, 90%, 95%, 99% or more identical to the amino acid sequence SEQ ID NO: 25 or 23, or an amino acid sequence which differs by no more than 1, 2, 5, 10, or 15 amino acid residues from the amino acid sequence of SEQ ID NO: 25 or 23; and a VL domain comprising the amino acid sequence of SEQ ID NO: 29, an amino acid sequence at least about 85%, 90%, 95%, 99% or more identical to the amino acid sequence SEQ ID NO: 29, or an amino acid sequence which differs by no more than 1, 2, 5, 10, or 15 amino acid residues from the amino acid sequence of SEQ ID NO: 29.

[0506] In some embodiments, the anti-TCRβV antibody molecule, e.g., anti-TCRβ V12 antibody molecule comprises: a VH domain comprising the amino acid sequence of SEQ ID NO: 25 or 23, an amino acid sequence at least about 85%, 90%, 95%, 99% or more identical to the amino acid sequence SEQ ID NO: 25 or 23, or an amino acid sequence which differs by no more than 1, 2, 5, 10, or 15 amino acid residues from the amino acid sequence of SEQ ID NO: 25 or 23; and a VL domain comprising the amino acid sequence of SEQ ID NO: 30, an amino acid sequence at least about 85%, 90%, 95%, 99% or more identical to the amino acid sequence SEQ ID NO: 30, or an amino acid sequence which differs by no more than 1, 2, 5, 10, or 15 amino acid residues from the amino acid sequence of SEQ ID NO: 30.

[0507] In some embodiments, the anti-TCRβV antibody molecule, e.g., anti-TCRβ V12 antibody molecule is a full antibody or fragment thereof (e.g., a Fab, F(ab′)₂, Fv, or a single chain Fv fragment (scFv)). In embodiments, the anti-TCRβV antibody molecule, e.g., anti-TCRβ V6 (e.g., anti-TCRβ V6-5*01) antibody molecule is a monoclonal antibody or an antibody with single specificity. In some embodiments, the anti-TCRβV antibody molecule, e.g., anti-TCRβ V12 antibody molecule, can also be a humanized, chimeric, camelid, shark, or an in vitro-generated antibody molecule. In some embodiments, the anti-TCRβV antibody molecule, e.g., anti-TCRβ V12 antibody molecule is a humanized antibody molecule. The heavy and light chains of the anti-TCRβV antibody molecule, e.g., anti-TCRβ V12 antibody molecule can be full-length (e.g., an antibody can include at least one, and preferably two, complete heavy chains, and at least one, and preferably two, complete light chains) or can include an antigen-binding fragment (e.g., a Fab, F(ab′)2, Fv, a single chain Fv fragment, a single domain antibody, a diabody (dAb), a bivalent antibody, or bispecific antibody or fragment thereof, a single domain variant thereof, or a camelid antibody).

[0508] In some embodiments, the anti-TCRβV antibody molecule, e.g., anti-TCRβ V12 antibody molecule is in the form of a TCR targeting molecule, e.g., a bispecific molecule, e.g., as described herein.

[0509] In some embodiments, the anti-TCRβV antibody molecule, e.g., anti-TCRβ V12 antibody molecule has a heavy chain constant region (Fc) chosen from, e.g., the heavy chain constant regions of IgG1, IgG2, IgG3, IgG4, IgM, IgA1, IgA2, IgD, and IgE. In some embodiments, the Fc region is chosen from the heavy chain constant regions of IgG1, IgG2, IgG3, and IgG4. In some embodiments, the Fc region is chosen from the heavy chain constant region of IgG1 or IgG2 (e.g., human IgG1, or IgG2). In some embodiments, the heavy chain constant region is human IgG1.

[0510] In some embodiments, the anti-TCRβV antibody molecule, e.g., anti-TCRβ V12 antibody molecule has a light chain constant region chosen from, e.g., the light chain constant regions of kappa or lambda, preferably kappa (e.g., human kappa). In some embodiments, the constant region is altered, e.g., mutated, to modify the properties of the anti-TCRβV antibody molecule, e.g., anti-TCRβ V12 antibody molecule (e.g., to increase or decrease one or more of: Fc receptor binding, antibody glycosylation, the number of cysteine residues, effector cell function, or complement function). For example, the constant region is mutated at positions 296 (M to Y), 298 (S to T), 300 (T to E), 477 (H to K) and 478 (N to F) to alter Fc receptor binding (e.g., the mutated positions correspond to positions 132 (M to Y), 134 (S to T), 136 (T to E), 313 (H to K) and 314 (N to F) of SEQ ID NOs: 212 or 214; or positions 135 (M to Y), 137 (S to T), 139 (T to E), 316 (H to K) and 317 (N to F) of SEQ ID NOs: 215, 216, 217 or 218).

[0511] Antibody B-H.1 comprises a first chain comprising the amino acid sequence of SEQ ID NO: 3280 and a second chain comprising the amino acid sequence of SEQ ID NO: 3281.

[0512] Additional exemplary anti-TCRβ V12 antibodies are provided in Table 2. In some embodiments, the anti-TCRβ V12 is antibody B, e.g., humanized antibody B (antibody B-H), as provided in Table 2. In some embodiments, the anti-TCRβV antibody comprises one or more (e.g., all three) of a LC CDR1, LC CDR2, and LC CDR3 provided in Table 2; and/or one or more (e.g., all three) of a HC CDR1, HC CDR2, and HC CDR3 provided in Table 2, or a sequence with at least 95% sequence identity thereto. In some embodiments, antibody B comprises a variable heavy chain (VH) and/or a variable light chain (VL) provided in Table 2, or a sequence with at least 95% sequence identity thereto.

[0513] In some embodiments, the anti-TCRVB 12 antibody molecule (e.g., anti-TCRVB 12-3 or anti-TCRVB 12-4 antibody molecule) comprises a VH of B-H.1A, B-H.1B, B-H.1C, B-H.1D, B-H.1E, B-H.1F, B-H.1G, B-H.1H, B-H.1, B-H.2, B-H.3, B-H.4, B-H.5, or B-H.6, or a sequence with at least 80%, 85%, 90%, 95%, 96%, 97%, 98%, 99% or more identity thereto.

[0514] In some embodiments, the anti-TCRVB 12 antibody molecule (e.g., anti-TCRVB 12-3 or anti-TCRVB 12-4 antibody molecule) comprises a VL of B-H.1A, B-H.1B, B-H.1C, B-H.1D, B-H.1E, B-H.1F, B-H.1G, B-H.1H, B-H.1, B-H.2, B-H.3, B-H.4, B-H.5, or B-H.6, or a sequence with at least 80%, 85%, 90%, 95%, 96%, 97%, 98%, 99% or more identity thereto.

[0515] In some embodiments, the anti-TCRVB 12 antibody molecule (e.g., anti-TCRVB 12-3 or anti-TCRVB 12-4 antibody molecule) comprises a VH of B-H.1A, B-H.1B, B-H.1C, B-H.1D, B-H.1E, B-H.1F, B-H.1G, B-H.1H, B-H.1, B-H.2, B-H.3, B-H.4, B-H.5, or B-H.6, or a sequence with at least 80%, 85%, 90%, 95%, 96%, 97%, 98%, 99% or more identity thereto; and a VL of B-H.1A, B-H.1B, B-H.1C, B-H.1D, B-H.1E, B-H.1F, B-H.1G, B-H.1H, B-H.1, B-H.2, B-H.3, B-H.4, B-H.5, or B-H.6, or a sequence with at least 80%, 85%, 90%, 95%, 96%, 97%, 98%, 99% or more identity thereto.

### Anti-TCRβ V5 Antibodies

[0516] In one aspect, provided herein is an anti-TCRβV antibody molecule that binds to human TCRβ V5. In some embodiments, the TCRβ V5 subfamily comprises TCRβ V5-5*01, TCRβ V5-6*01, TCRβ V5-4*01, TCRβ V5-8*01, TCRβ V5-1*01, or a variant thereof.

[0517] Exemplary anti-TCRβ V5 antibodies are provided in Table 10. In some embodiments, the anti-TCRβ V5 is antibody C, e.g., humanized antibody C (antibody C-H), as provided in Table 10. In some embodiments, the anti-TCRβV antibody comprises one or more (e.g., all three) of a LC CDR1, LC CDR2, and LC CDR3 provided in Table 10; and/or one or more (e.g., all three) of a HC CDR1, HC CDR2, and HC CDR3 provided in Table 10, or a sequence with at least 95% sequence identity thereto. In some embodiments, antibody C comprises a variable heavy chain (VH) and/or a variable light chain (VL) provided in Table 10, or a sequence with at least 95% sequence identity thereto.

[0518] Exemplary anti-TCRβ V5 antibodies are provided in Table 11. In some embodiments, the anti-TCRβ V5 is antibody E, e.g., humanized antibody E (antibody E-H), as provided in Table 11. In some embodiments, the anti-TCRβV antibody comprises one or more (e.g., all three) of a LC CDR1, LC CDR2, and LC CDR3 provided in Table 11; and/or one or more (e.g., all three) of a HC CDR1, HC CDR2, and HC CDR3 provided in Table 11, or a sequence with at least 95% sequence identity thereto. In some embodiments, antibody E comprises a variable heavy chain (VH) and/or a variable light chain (VL) provided in Table 11, or a sequence with at least 95% sequence identity thereto.

[0519] In some embodiments, antibody E comprises a heavy chain comprising the amino acid sequence of SEQ ID NO: 3284 and/or a light chain comprising the amino acid sequence of SEQ ID NO: 3285, or a sequence with at least 95% sequence identity thereto.

[0520] In some embodiments, the anti-TCRβ V5 antibody molecule comprises a VH and/or a VL of an antibody described in Table 10, or a sequence with at least 80%, 85%, 90%, 95%, 96%, 97%, 98%, 99% or more identity thereto.

[0521] In some embodiments, the anti-TCRβ V5 antibody molecule comprises a VH and a VL of an antibody described in Table 10, or a sequence with at least 80%, 85%, 90%, 95%, 96%, 97%, 98%, 99% or more identity thereto.

[0522] In some embodiments, the anti-TCRβ V5 antibody molecule comprises a VH and/or a VL of an antibody described in Table 11, or a sequence with at least 80%, 85%, 90%, 95%, 96%, 97%, 98%, 99% or more identity thereto.

[0523] In some embodiments, the anti-TCRβ V5 antibody molecule comprises a VH and a VL of an antibody described in Table 11, or a sequence with at least 80%, 85%, 90%, 95%, 96%, 97%, 98%, 99% or more identity thereto.

### Anti-TCRβ V10 Antibodies

[0524] In one aspect, provided herein is an anti-TCRβV antibody molecule that binds to a human TCRβ V10 subfamily member. In some embodiments, TCRβ V10 subfamily is also known as TCRβ V12. In some embodiments, the TCRβ V10 subfamily comprises: TCRβ V10-1*01, TCRβ V10-1*02, TCRβ V10-3*01 or TCRβ V10-2*01, or a variant thereof.

[0525] Exemplary anti-TCRβ V10 antibodies are provided in Table 12. In some embodiments, the anti-TCRβ V10 is antibody D, e.g., humanized antibody D (antibody D-H), as provided in Table 12. In some embodiments, antibody D comprises one or more (e.g., three) light chain CDRs and/or one or more (e.g., three) heavy chain CDRs provided in Table 12, or a sequence with at least 95% sequence identity thereto. In some embodiments, antibody D comprises a variable heavy chain (VH) and/or a variable light chain (VL) provided in Table 12, or a sequence with at least 95% sequence identity thereto.

[0526] In some embodiments, the anti-TCRβ V10 antibody molecule comprises a VH or a VL of an antibody described in Table 12, or a sequence with at least 80%, 85%, 90%, 95%, 96%, 97%, 98%, 99% or more identity thereto.

[0527] In some embodiments, the anti-TCRβ V10 antibody molecule comprises a VH and a VL of an antibody described in Table 12, or a sequence with at least 80%, 85%, 90%, 95%, 96%, 97%, 98%, 99% or more identity thereto.

### Anti-TCRβ V13 Antibodies

[0528] In one aspect, provided herein is an anti-TCRβV antibody molecule that binds to a mouse TCRβ V13 subfamily member. In some embodiments, the mouse TCRβ V13 subfamily comprises: TCRβ V13-1, TCRβ V13-2, TCRβ V13-3, or a variant thereof.

[0529] Exemplary anti-TCRβ V13 antibodies are provided in Table 13. In some embodiments, the anti-TCRβ V13 is antibody MR5-2, as provided in Table 13. In some embodiments, antibody MR5-2 comprises one or more (e.g., three) light chain CDRs and/or one or more (e.g., three) heavy chain CDRs provided in Table 13, or a sequence with at least 95% sequence identity thereto. In some embodiments, antibody MR5-2 comprises a variable heavy chain (VH) and/or a variable light chain (VL) provided in Table 13, or a sequence with at least 95% sequence identity thereto.

[0530] In some embodiments, the anti-TCRβ V13 antibody molecule comprises a VH or a VL of an antibody described in Table 13, or a sequence with at least 80%, 85%, 90%, 95%, 96%, 97%, 98%, 99% or more identity thereto. In some embodiments, the anti-TCRβ V13 antibody molecule comprises a VH and a VL of an antibody described in Table 12, or a sequence with at least 80%, 85%, 90%, 95%, 96%, 97%, 98%, 99% or more identity thereto.

[0531] In some embodiments, an anti-TCRβ V13 antibody as described herein may comprise a humanized antibody. In some embodiments, an anti-TCRβ V13 antibody as described herein comprises one or more (e.g., three) light chain CDRs and/or one or more (e.g., three) heavy chain CDRs provided in Table 13, or a sequence with at least 95% sequence identity thereto. In some embodiments, a sequence of a HC CDR1 of the anti-TCRβ V13 antibody can comprise at least about 95%, 96%, 97%, 98%, 99%, 99.5%, 99.9%, or 100% sequence identity to an amino acid sequence as set forth in any one of SEQ ID NOs: 7500, 7503, or 7505. In some embodiments, a sequence of a HC CDR2 of the anti-TCRβ V13 antibody can comprise at least about 95%, 96%, 97%, 98%, 99%, 99.5%, 99.9%, or 100% sequence identity to an amino acid sequence as set forth in any one of SEQ ID NOs: 7501 or 7504. In some embodiments, a sequence of a HC CDR3 of the anti-TCRβ V13 antibody can comprise at least about 95%, 96%, 97%, 98%, 99%, 99.5%, 99.9%, or 100% sequence identity to an amino acid sequence as set forth in SEQ ID NO: 7502. In some embodiments, a sequence of a LC CDR1 of the anti-TCRβ V13 antibody can comprise at least about 95%, 96%, 97%, 98%, 99%, 99.5%, 99.9%, or 100% sequence identity to an amino acid sequence as set forth in SEQ ID NO: 7506. In some embodiments, a sequence of a LC CDR2 of the anti-TCRβ V13 antibody can comprise at least about 95%, 96%, 97%, 98%, 99%, 99.5%, 99.9%, or 100% sequence identity to an amino acid sequence as set forth in SEQ ID NO: 7507. In some embodiments, a sequence of a LC CDR3 of the anti-TCRβ V13 antibody can comprise at least about 95%, 96%, 97%, 98%, 99%, 99.5%, 99.9%, or 100% sequence identity to an amino acid sequence as set forth in SEQ ID NO: 7508.

[0532] In some embodiments, an anti-TCRβ V13 antibody described herein can comprise a VH comprising at least about 80%, 85%, 90%, 91%, 92%, 93%, 94%, 95%, 96%, 97%, 98%, 98.5%, 99%, 99.5%, 99.9%, or 100% sequence identity to an amino acid sequence as set forth in SEQ ID NO: 7509. In some embodiments, an anti-TCRβ V13 antibody described herein can comprise a VL comprising at least about 80%, 85%, 90%, 91%, 92%, 93%, 94%, 95%, 96%, 97%, 98%, 98.5%, 99%, 99.5%, 99.9%, or 100% sequence identity to an amino acid sequence as set forth in SEQ ID NO: 3527. In some embodiments, an anti-TCRβ V13 antibody described herein can comprise a heavy chain comprising at least about 70%, 75%, 80%, 85%, 90%, 91%, 92%, 93%, 94%, 95%, 96%, 97%, 98%, 98.5%, 99%, 99.5%, 99.9%, or 100% sequence identity to an amino acid sequence as set forth in SEQ ID NO: 7511. In some embodiments, an anti-TCRβ V13 antibody described herein can comprise a light chain comprising at least about 70%, 75%, 80%, 85%, 90%, 91%, 92%, 93%, 94%, 95%, 96%, 97%, 98%, 98.5%, 99%, 99.5%, 99.9%, or 100% sequence identity to an amino acid sequence as set forth in SEQ ID NO: 7512.

### Additional Anti-TCRVβ Antibodies

[0533] Additional exemplary anti-TCRβV antibodies are provided in Table 13. In some embodiments, the anti-TCRβV antibody is a humanized antibody, e.g., as provided in Table 13. In some embodiments, the anti-TCRβV antibody comprises one or more (e.g., all three) of a LC CDR1, LC CDR2, and LC CDR3 provided in Table 13; and/or one or more (e.g., all three) of a HC CDR1, HC CDR2, and HC CDR3 provided in Table 13, or a sequence with at least 95% sequence identity thereto. In some embodiments, the anti-TCRβV antibody comprises a variable heavy chain (VH) and/or a variable light chain (VL) provided in Table 13, or a sequence with at least 95% sequence identity thereto.

### Antibody-Like Frameworks or Scaffolds

[0534] A wide variety of antibody/immunoglobulin frameworks or scaffolds can be employed in the anti-TCRVA or anti-TCRVB antibody molecules as described herein or multifunctional formats thereof so long as the resulting polypeptide includes at least one binding region which specifically binds to the target antigen, e.g., a TCRVA or TCRVB. Such frameworks or scaffolds include the 5 main idiotypes of human immunoglobulins, or fragments thereof, and include immunoglobulins of other animal species, preferably having humanized aspects. Novel frameworks, scaffolds and fragments continue to be discovered and developed by those skilled in the art.

[0535] In some embodiments, the anti-TCRVA or anti-TCRVB antibody molecules as described herein or multifunctional formats thereof include non-immunoglobulin based antibodies using non-immunoglobulin scaffolds onto which CDRs can be grafted. Any non-immunoglobulin frameworks and scaffolds may be employed, as long as they comprise a binding region specific for the target antigen (e.g., TCRVA or TCRVB). Exemplary non-immunoglobulin frameworks or scaffolds include, but are not limited to, fibronectin (Compound Therapeutics, Inc., Waltham, MA), ankyrin (Molecular Partners AG, Zurich, Switzerland), domain antibodies (Domantis, Ltd., Cambridge, MA, and Ablynx nv, Zwijnaarde, Belgium), lipocalin (Pieris Proteolab AG, Freising, Germany), small modular immuno-pharmaceuticals (Trubion Pharmaceuticals Inc., Seattle, WA), maxybodies (Avidia, Inc., Mountain View, CA), Protein A (Affibody AG, Sweden), and affilin (gamma-crystallin or ubiquitin) (Scil Proteins GmbH, Halle, Germany).

[0536] Fibronectin scaffolds are typically based on fibronectin type III domain (e.g., the tenth module of the fibronectin type III (10 Fn3 domain)). The fibronectin type III domain has 7 or 8 beta strands which are distributed between two beta sheets, which themselves pack against each other to form the core of the protein, and further containing loops (analogous to CDRs) which connect the beta strands to each other and are solvent exposed. There are at least three such loops at each edge of the beta sheet sandwich, where the edge is the boundary of the protein perpendicular to the direction of the beta strands (see U.S. Pat. No. 6,818,418). Because of this structure, the non-immunoglobulin antibody mimics antigen binding properties that are similar in nature and affinity to those of antibodies. These scaffolds can be used in a loop randomization and shuffling strategy in vitro that is similar to the process of affinity maturation of antibodies in vivo. These fibronectin-based molecules can be used as scaffolds where the loop regions of the molecule can be replaced with CDRs of the invention using standard cloning techniques.

[0537] The ankyrin technology is based on using proteins with ankyrin derived repeat modules as scaffolds for bearing variable regions which can be used for binding to different targets. The ankyrin repeat module typically is a about 33 amino acid polypeptide consisting of two anti-parallel c-helices and a β-turn. Binding of the variable regions can be optimized by using ribosome display.

[0538] Avimers are used by nature for protein-protein interactions and in human over 250 proteins are structurally based on A-domains. Avimers consist of a number of different “A-domain” monomers (2-10) linked via amino acid linkers. Avimers can be created that can bind to the target antigen using the methodology described in, for example, U.S. Patent Application Publication Nos. 20040175756; 20050053973; 20050048512; and 20060008844.

[0539] Affibody affinity ligands are small, simple proteins composed of a three-helix bundle based on the scaffold of one of the IgG-binding domains of Protein A. Protein A is a surface protein from the bacterium Staphylococcus aureus. This scaffold domain consists of 58 amino acids, 13 of which are randomized to generate affibody libraries with a large number of ligand variants (See e.g., U.S. Pat. No. 5,831,012). Affibody molecules mimic antibodies, they have a molecular weight of 6 kDa, compared to the molecular weight of antibodies, which is 150 kDa. In spite of its small size, the binding site of affibody molecules is similar to that of an antibody.

[0540] Anticalins are known commercially, e.g., Pieris ProteoLab AG. They are derived from lipocalins, a widespread group of small and robust proteins that are usually involved in the physiological transport or storage of chemically sensitive or insoluble compounds. Several natural lipocalins occur in human tissues or body liquids. The protein architecture is reminiscent of immunoglobulins, with hypervariable loops on top of a rigid framework. However, in contrast with antibodies or their recombinant fragments, lipocalins are composed of a single polypeptide chain with 160 to 180 amino acid residues, being just marginally bigger than a single immunoglobulin domain. The set of four loops, which makes up the binding pocket, shows pronounced structural plasticity and tolerates a variety of side chains. The binding site can thus be reshaped in a proprietary process in order to recognize prescribed target molecules of different shape with high affinity and specificity. One protein of lipocalin family, the bilin-binding protein (BBP) of Pieris Brassicae has been used to develop anticalins by mutagenizing the set of four loops. One example of a patent application describing anticalins is in PCT Publication No. WO 199916873.

[0541] Affilin molecules are small non-immunoglobulin proteins which are designed for specific affinities towards proteins and small molecules. New affilin molecules can be very quickly selected from two libraries, each of which is based on a different human derived scaffold protein. Affilin molecules do not show any structural homology to immunoglobulin proteins. Currently, two affilin scaffolds are employed, one of which is gamma crystalline, a human structural eye lens protein and the other is “ubiquitin” superfamily proteins. Both human scaffolds are very small, show high temperature stability and are almost resistant to pH changes and denaturing agents. This high stability is mainly due to the expanded beta sheet structure of the proteins. Examples of gamma crystalline derived proteins are described in WO200104144 and examples of “ubiquitin-like” proteins are described in WO2004106368.

[0542] Protein epitope mimetics (PEM) are medium-sized, cyclic, peptide-like molecules (MW 1-2 kDa) mimicking beta-hairpin secondary structures of proteins, the major secondary structure involved in protein-protein interactions.

[0543] Domain antibodies (dAbs) can be used in the anti-TCRVA or anti-TCRVB antibody molecules as described herein or multifunctional formats thereof are small functional binding fragments of antibodies, corresponding to the variable regions of either the heavy or light chains of antibodies. Domain antibodies are well expressed in bacterial, yeast, and mammalian cell systems. Further details of domain antibodies and methods of production thereof are known in the art (see, for example, U.S. Pat. Nos. 6,291,158; 6,582,915; 6,593,081; 6,172,197; 6,696,245; European Patents 0368684 & 0616640; WO05/035572, WO04/101790, WO04/081026, WO04/058821, WO04/003019 and WO03/002609. Nanobodies are derived from the heavy chains of an antibody.

[0544] A nanobody typically comprises a single variable domain and two constant domains (CH2 and CH3) and retains antigen-binding capacity of the original antibody. Nanobodies can be prepared by methods known in the art (See e.g., U.S. Pat. Nos. 6,765,087, 6,838,254, WO 06/079372). Unibodies consist of one light chain and one heavy chain of an IgG4 antibody. Unibodies may be made by the removal of the hinge region of IgG4 antibodies. Further details of unibodies and methods of preparing them may be found in WO2007/059782.

### Antibody Effector Function and Fc Region

[0545] In some embodiments, an anti-TCRVA or anti-TCRVB antibody as described herein comprises an Fc region, e.g., as described herein. In some embodiments, the Fc region is a wildtype Fc region, e.g., a wildtype human Fc region. In some embodiments, the Fc region comprises a variant, e.g., an Fc region comprising an addition, substitution, or deletion of at least one amino acid residue in the Fc region which results in, e.g., reduced or ablated affinity for at least one Fc receptor.

[0546] The Fc region of an antibody interacts with a number of receptors or ligands including Fe Receptors (e.g., FcγRI, FcγRIIA, FcγRIIIA), the complement protein CIq, and other molecules such as proteins A and G. These interactions are essential for a variety of effector functions and downstream signaling events including: antibody dependent cell-mediated cytotoxicity (ADCC), Antibody-dependent cellular phagocytosis (ADCP) and complement dependent cytotoxicity (CDC).

[0547] In some embodiments, an anti-TCRVA or anti-TCRVB antibody comprising a wild-type Fc region or a variant Fc region that has enhanced affinity for an Fc receptor, e.g., an Fc receptor described herein. In some embodiments, the enhanced affinity is compared to an otherwise similar antibody with a wildtype Fc region.

[0548] In some embodiments, the anti-TCRVA or anti-TCRVB antibody molecule disclosed herein has a light chain constant region chosen from, e.g., the light chain constant regions of kappa or lambda, preferably kappa (e.g., human kappa). In some embodiments, the constant region is altered, e.g., mutated, to modify the properties of the anti-TCRαV or anti-TCRβV antibody molecule (e.g., to increase or decrease one or more of: Fc receptor binding, antibody glycosylation, the number of cysteine residues, effector cell function, or complement function). For example, the constant region is mutated at positions 296 (M to Y), 298 (S to T), 300 (T to E), 477 (H to K) and 478 (N to F) to alter Fc receptor binding (e.g., the mutated positions correspond to positions 132 (M to Y), 134 (S to T), 136 (T to E), 313 (H to K) and 314 (N to F) of SEQ ID NOs: 212 or 214; or positions 135 (M to Y), 137 (S to T), 139 (T to E), 316 (H to K) and 317 (N to F) of SEQ ID NOs: 215, 216, 217 or 218).

[0549] Disclosed herein are methods of inhibiting or preventing the activation and/or expansion of autoreactive T cells in a subject comprising administering an anti-TCRVα antibody comprising a variant Fc region. In some embodiments, the administering occurs in vivo or in vitro. In some embodiments, the anti-TCRVα antibody comprising a variant Fc region has increased binding to C1q complement. In some embodiments, the anti-TCRVα antibody comprising a variant Fc region has increased effector function (e.g., increased antibody dependent cell-mediated cytotoxicity (ADCC), antibody-dependent cellular phagocytosis (ADCP) and/or complement dependent cytotoxicity (CDC). In some embodiments, the subject has an autoimmune disease.

[0550] Disclosed herein are methods of reducing or depleting autoreactive T cells in a subject comprising administering an anti-TCRVα antibody comprising a variant Fc region. In some embodiments, the administering occurs in vivo or in vitro. In some embodiments, the anti-TCRVα antibody comprising a variant Fc region has increased binding to C1q complement. In some embodiments, the anti-TCRVα antibody comprising a variant Fc region has increased effector function (e.g., increased antibody dependent cell-mediated cytotoxicity (ADCC), antibody-dependent cellular phagocytosis (ADCP) and/or complement dependent cytotoxicity (CDC). In some embodiments, the subject has an autoimmune disease.

[0551] In some embodiments, the first TCRβV-binding moiety, the second TCRβV-binding moiety, or a combination thereof binds to one or more of a TCRβV subfamily selected from the group consisting of: (i) TCRβ V2 subfamily comprising TCRβ V2*01; (ii) TCRβ V3 subfamily comprising TCRβ V3-1*01; (iii) TCRβ V4 subfamily comprising one or more selected from TCRβ V4-1, TCRβ V4-2, and TCRβ V4-3; (iv) TCRβ V5 subfamily comprising one or more selected from TCRβ V5-6*01, TCRβ V5-4*01, TCRβ V5-1*01, and TCRβ V5-8*01; (v) the TCRβ V6 subfamily comprising one or more selected from TCRβ V6-4*01, TCRβ V6-4*02, TCRβ V6-9*01, TCRβ V6-8*01, TCRβ V6-5*01, TCRβ V6-6*02, TCRβ V6-6*01, TCRβ V6-2*01, TCRβ V6-3*01, and TCRβ V6-1*01; (vi) TCRβ V9 subfamily; (vii) TCRβ V10 subfamily comprising one or more selected from TCRβ V10-1*01, TCRβ V10-1*02, TCRβ V10-3*01, and TCRβ V10-2*01; (viii) TCRβ V11 subfamily comprising TCRβ VII-2; (ix) TCRβ V12 subfamily comprising one or more selected from TCRβ V12-4*01, TCRβ V12-3*01, and TCRβ V12-5*01; (x) TCRβ V13 subfamily comprising TCRβ V13*01; (xi) TCRβ V16 subfamily comprising TCRβ V16*01; (xii) TCRβ V19 subfamily comprising one or more selected from TCRβ V19*01 and TCRβ V19*02; (xiii) TCRβ V21 subfamily. (xiv) TCRβ V23 subfamily. (xv) TCRβ V27 subfamily; (xvi) TCRβ V28 subfamily, (xvii) TCRβ V29 subfamily, and (vxviii) TCRβ V30 subfamily.

### CARs and Cells Comprising the CAR

[0552] Chimeric antigen receptors (CARs) and engineered T cell receptors (TCRs), which comprise binding domains capable of interacting with a particular antigen, can allow T cells to suppress and/or kill target cells that express the particular antigen. Besides the ability of genetically modified T cells expressing a CAR or an engineered TCR to recognize and destroy respective target cells in vitro/ex vivo, CAR T cells show favorable kinetics compared to conventional drugs because they expand and persist in the patient's body. Without wishing to be bound by any particular theory, the molecules disclosed herein comprise a recombinant T cell receptor or chimeric antigen receptor (CAR) that binds to a TCRαV and/or a TCRβV and may be used to suppress and/or kill autoreactive T cells expressing the TCRαV and/or the TCRβV in a subject in need thereof. T cells isolated from the subject can be modified to express the appropriate anti-TCRαV and/or anti-TCRβV CAR, expanded ex vivo, and then reinfused into the subject. The modified CAR T cells can recognize the target cells expressing the target TCRV region, become activated, and kill the target cells.

[0553] Disclosed herein, in some embodiments, is a recombinant T cell receptor or a CAR that may comprise an extracellular domain (e.g., an antigen binding domain) that binds TCRαV and/or TCRβV, a transmembrane domain, and an intracellular signaling domain, wherein the intracellular signaling domain may comprise a costimulatory signaling region.

[0554] In some embodiments, a genetically modified cell, such as a helper T cell, a cytotoxic T cell, a memory T cell, gamma delta T cell, a natural killer cell, cytokine induced killer cell, a cell line thereof, a T memory stem cell, and other effector cell, comprises a chimeric antibody (anti-TCRαV and/or anti-TCRβV CAR), wherein the anti-TCRαV and/or the anti-TCRβV CAR comprises an extracellular domain comprising an autoantigen or fragment thereof, a transmembrane domain, and an intracellular signaling domain. In some embodiments, the genetically modified cell comprises the anti-TCRαV and/or anti-TCRβV CAR described herein. In another embodiment, the cell expresses the anti-TCRαV and/or anti-TCRβV CAR. In some embodiments, the cell has a high affinity for a TCRαV and/or a TCRβV. As a result, the cell can induce killing of autoreactive T cells expressing the TCRαV and/or the TCRβV.

[0555] It is also useful for the CAR T cell to have limited toxicity toward healthy cells, e.g., not autoreactive cell, and specificity to cells expressing other TCR (e.g. gamma delta T cells). Such specificity prevents or reduces off-target toxicity.

[0556] In some embodiments, the CAR T cell comprises a T cell, such as a primary cell, an expanded T cell derived from primary T cells, a T cell derived from stem cells differentiated in vitro, a T cell line such as Jurkat cells, other sources of T cells, combinations thereof, and other effector cells. Further assessment of efficacy and safety of the anti-GD TCR CAR can be performed, for example, as follows: Constructs can be transiently transfected into human cells, such as 293T/17. The surface expression can be detected with monoclonal antibodies (either IgG or ScFv) specific for extracellular domains, a linker between the domains, or other structure included in the anti-TCRαV and/or the anti-TCRβV CAR. Binding can be verified with specific secondary antibodies and quantified by flow cytometry. Additional target cell lines can be produced as needed by expression of human monoclonal antibodies on the surface of K562 cells.

### The Extracellular Domain

[0557] The extracellular domain that binds TCRαV and/or TCRβV may be any anti-TCRαV antibody, any anti-TCRβV antibody, or any fragments thereof disclosed herein. In certain embodiments, the extracellular domain/antigen binding domain may comprise a heavy chain variable region that may comprise three heavy chain complementarity determining regions (HCDRs), and a light chain variable region that may comprise three light chain complementarity determining regions (LCDRs). In some embodiment, the extracellular domain that binds TCRαV and/or TCRβV may be a Fab or a scFv.

[0558] In some instances, it is beneficial that the antigen binding domain is derived from the same species in which the CAR will ultimately be used. For example, for use in humans, it may be beneficial that the antigen binding domain of the CAR may comprise a human antigen receptor that binds a human antigen or a fragment thereof. In one exemplary embodiment, the CAR may bind a TCRαV and/or TCRβV in a mammal (e.g., a human).

[0559] In some embodiments, the extracellular domain that binds a TCRαV binds to one or more of a TCRαV subfamily selected from the group consisting of: a TCRα V1 subfamily, a TCRα V2 subfamily, a TCRα V3 subfamily, a TCRα V4, a TCRα V5 subfamily, a TCRα V6 subfamily, a TCRα V7 subfamily, a TCRα V8 subfamily, a TCRα V9 subfamily, a TCRα V10 subfamily, a TCRα V12 subfamily, a TCRα V13 subfamily, a TCRα V14 subfamily, a TCRα V16 subfamily, a TCRα V17 subfamily, a TCRα V18 subfamily, a TCRα V19 subfamily, a TCRα V20 subfamily, a TCRα V21 subfamily, a TCRα V22 subfamily, a TCRα V23 subfamily, a TCRα V24 subfamily, TCRα V25 subfamily, a TCRα V26 subfamily, a TCRα V27 subfamily, a TCRα V29 subfamily, a TCRα V30 subfamily, a TCRα V34 subfamily, a TCRα V35 subfamily, a TCRα V36 subfamily, a TCRα V38 subfamily, a TCRα V39 subfamily, a TCRα V40 subfamily, or a TCRα V41 subfamily, as well as family members of said subfamilies, and variants thereof.

[0560] In some embodiments, the extracellular domain that binds a TCRβV binds to one or more of a TCRβV subfamily selected from the group consisting of: a TCRβ V1 subfamily, a TCRβ V2 subfamily, a TCRβ V3 subfamily, a TCRβ V4, a TCRβ V5 subfamily, a TCRβ V6 subfamily, a TCRβ V7 subfamily, a TCRβ V8 subfamily, a TCRβ V9 subfamily, a TCRβ V10 subfamily, a TCRβ VII subfamily, a TCRβ V12 subfamily, a TCRβ V13 subfamily, a TCRβ V14 subfamily, a TCRβ V15 subfamily, a TCRβ V16 subfamily, a TCRβ V17 subfamily, a TCRβ V18 subfamily, a TCRβ V20 subfamily, a TCRβ V21 subfamily, a TCRβ V22 subfamily, a TCRβ V23 subfamily, a TCRβ V24 subfamily, TCRβ V25 subfamily, a TCRβ V26 subfamily, a TCRβ V27 subfamily, a TCRβ V29 subfamily, a TCRβ V30 subfamily, as well as family members of said subfamilies, and variants thereof.

Transmembrane Domain and/or Hinge Domain

[0561] With respect to the transmembrane domain, in various embodiments, the CAR may comprise a transmembrane domain that is fused to the extracellular domain of the CAR. In one embodiment, the CAR may comprise a transmembrane domain that naturally is associated with one of the domains in the CAR. In some embodiments, the transmembrane domain is selected or modified by amino acid substitution to avoid binding to the transmembrane domains of the same or different surface membrane proteins in order to minimize interactions with other members of the receptor complex.

[0562] The transmembrane domain may be derived either from a natural or from a synthetic source. When the source is natural, the domain may be derived from any membrane-bound or transmembrane protein. In one embodiment, the transmembrane domain may be synthetic, in which case it may comprise predominantly hydrophobic residues such as leucine and valine. In one aspect, a triplet of phenylalanine, tryptophan and valine may be found at each end of a synthetic transmembrane domain. Optionally, a short oligo- or polypeptide linker, between 2 and 10 amino acids in length may form the linkage between the transmembrane domain and the cytoplasmic signaling domain of the CAR. A glycine-serine (GS) doublet provides a particularly suitable linker.

[0563] In some embodiments, a variety of human hinges can be employed as well, including, but not limited to, the human Ig (immunoglobulin) hinge domain and the CD8 alpha hinge domain. Examples of the hinge and/or transmembrane domain include, but are not limited to, a hinge and/or transmembrane domain of an alpha, beta or zeta chain of a T-cell receptor, CD28, CD3 epsilon, CD45, CD4, CD5, CD8, CD9, CD16, CD22, CD33, CD37, CD64, CD80, CD86, CD 134, CD137, CD154, KIR, 0X40, CD2, CD27, LFA-1 (CD 11 a, CD18), ICOS (CD278), 4-1BB (CD 137), GITR, CD40, BAFFR, HVEM (LIGHTR), SLAMF7, NKp80 (KLRFl), CD160, CD 19, IL2R beta, IL2R gamma, IL7R a, ITGA1, VLA1, CD49a, ITGA4, IA4, CD49D, ITGA6, VLA-6, CD49f, ITGAD, CDlld, ITGAE, CD103, ITGAL, CDlla, LFA-1, IT GAM, CDllb, ITGAX, CDllc, ITGB1, CD29, ITGB2, CD18, LFA-1, ITGB7, TNFR2, DNAM1 (CD226), SLAMF4 (CD244, 2B4), CD84, CD96 (Tactile), CEACAM1, CRT AM, Ly9 (CD229), CD 160 (BY55), PSGL1, CD100 (SEMA4D), SLAMF6 (NTB-A, Ly108), SLAM (SLAMF1, CD150, IPO-3), BLAME (SLAMF8), SELPLG (CD162), LTBR, PAG/Cbp, NKp44, NKp30, NKp46, NKG2D, and/or NKG2C.

### Intracellular Signaling Domain

[0564] The CAR of the present disclosure may comprise an intracellular signaling domain, wherein the intracellular signaling domain may comprise a costimulatory signaling region. The intracellular signaling domain of the CAR is responsible for activation of at least one of the effector functions of the cell in which the CAR is expressed. The intracellular domain transduces the effector function signal and directs the cell to perform its specialized function. Examples of an intracellular signaling domain include, but are not limited to, the cytoplasmic portion of a surface receptor, a co-stimulatory molecule, and any molecule that acts in concert to initiate signal transduction in the T cell, as well as any derivative or variant of these elements and any synthetic sequence that has the same functional capability.

[0565] As used herein, a “costimulatory molecule,” refers to a molecule on an antigen presenting cell (e.g., an APC, dendritic cell, B cell, and the like) that specifically binds a cognate co-stimulatory molecule on a T cell, thereby providing a signal which, in addition to the primary signal provided by, for instance, binding of a TCR/CD3 complex with an MHC molecule loaded with peptide, mediates a T cell response, including, but not limited to, proliferation, activation, differentiation, and the like. Exemplary costimulatory molecules including but are not limited to CD27, CD28, 4-1BB (CD137), 0X40, CD30, CD40, PD-1, ICOS, lymphocyte function-associated antigen-1 (LFA-1), CD2, CD7, LIGHT, NKG2C, B7-H3, or a ligand that specifically binds with CD83.

[0566] Examples of the intracellular signaling domain include, without limitation, the ζ chain of the T cell receptor complex or any of its homologs, e.g., η chain, FcsRFγ and β chains, MB 1 (Iga) chain, B29 (Ig) chain, etc., human CD3 zeta chain, CD3 polypeptides (Δ, δ and ε), syk family tyrosine kinases (Syk, ZAP 70, etc.), src family tyrosine kinases (Lck, Fyn, Lyn, etc.), and other molecules involved in T cell transduction, such as CD2, CD5 and CD28. In one embodiment, the intracellular signaling domain may be human CD3 zeta chain, FcγRIII, FcsRI, cytoplasmic tails of Fc receptors, an immunoreceptor tyrosine-based activation motif (ITAM) bearing cytoplasmic receptors, and combinations thereof.

[0567] In certain embodiments, the intracellular signaling domain of the CAR includes any portion of one or more co-stimulatory molecules, such as at least one signaling domain from CD2, CD3, CD8, CD27, CD28, ICOS (CD278), 4-1BB, PD-1, any derivative or variant thereof, any synthetic sequence thereof that has the same functional capability, and any combination thereof. In certain embodiments, the intracellular domain may comprise a costimulatory domain of a protein selected from the group consisting of proteins in the TNFR superfamily, CD28, 4-IBB (CD 137), 0X40 (CD 134), PD-1, CD7, LIGHT, CD83L, DAPIO, DAP 12, CD27, CD2, CD5, ICAM-1, LFA-1, Lek, TNFR-I, TNFR-II, Fas, CD30, CD40, ICOS, NKG2C, and B7-H3 (CD276), or a variant thereof, or an intracellular domain derived from a killer immunoglobulin-like receptor (KIR).

[0568] In one embodiment, the CAR of the disclosure may comprise a CD137 (4-1BB) signaling domain. For example, inclusion of the CD137 (4-1BB) signaling domain significantly increased CAR mediated activity and in vivo persistence of CAR T cells compared to an otherwise identical CAR T cell not engineered to express CD137 (4-1BB). However, the disclosure is not limited to a specific CAR. Rather, any CAR that targets TCRαV and/or TCRβV, can be used in the present disclosure. Compositions and methods of making and using CARs have been described in PCT/US11/64191, which is incorporated by reference in its entirety herein. In certain embodiments, the intracellular signaling domain may comprise CD3zeta. In certain embodiments, the intracellular signaling domain may comprise CD28 and CD3zeta. In certain embodiments, the intracellular signaling domain may comprise 4-1BB and CD3zeta.

[0569] In certain embodiments, the intracellular signaling domain may comprise CD3zeta. In certain embodiments, the intracellular signaling domain may comprise CD28 and CD3zeta. In certain embodiments, the intracellular signaling domain may comprise 4-1BB and CD3zeta.

[0570] In another aspect, provided herein is a T cell genetically modified to express a recombinant T cell receptor, wherein the recombinant T cell receptor comprises a domain that binds a TCRαV and/or TCRβV. In some embodiments, the domain that binds a Va region of a T cell receptor may be an α/β heterodimer of the recombinant T cell receptor.

[0571] In some embodiments, provide herein are T cells genetically modified to express any of the TCRαV-specific CAR disclosed herein. In some embodiments, the cell may have high affinity for cells expressing TCRαV.

[0572] In some embodiments, provide herein are T cells genetically modified to express any of the TCRβV-specific CAR disclosed herein. In some embodiments, the cell may have high affinity for cells expressing TCRβV.

[0573] In some embodiments, the genetically modified cell may be a T cell, such as a helper T cell, a cytotoxic T cell, a memory T ceil, regulatory T cell, gamma delta T cell, a natural killer cell, cytokine induced killer cell, a cell line thereof, a T memory stem cell, or other T effector cell. It may be also useful for the T cell to have limited toxicity toward healthy cells and to have specificity to cells expressing the TCRαV and/or TCRβV. In some embodiments, the genetically modified T cell may be specific for the TCRαV and/or TCRβV from a specific T cell clone. Such specificity may prevent or reduce off-target toxicity that is prevalent in current therapies that are not specific. In one embodiment, the T cell may have limited toxicity toward healthy cells. In one embodiment the T cell may be an autologous cell. In another embodiment, the T cell may be an allogeneic cell.

[0574] In some embodiments, the disclosure includes genetically modified immune cells derived from pluripotent stem cells that were differentiated in vitro. In other embodiments, the disclosure includes T cells, such as primary cells, expanded T cells derived from primary T cells, T cells derived from stem cells differentiated in vitro, T cell lines such as Jurkat cells, other sources of T cells, combinations thereof, and other effector cells.

[0575] Disclosed herein are methods of inhibiting or preventing the activation and/or expansion of autoreactive T cells in a subject comprising administering a CAR T cell comprising a CAR with an anti-TCRαV binding domain and/or an anti-TCRαV binding domain that binds to the TCRαV and/or TCRβV expressed by the autoreactive T cells. In some embodiments, the CAR T cell comprises a CAR comprising an anti-TCRαV binding domain that binds to the TCRαV expressed by the autoreactive T cells. In some embodiments, the CAR T cell comprises a CAR with an anti-TCRβV binding domain that binds to the TCRαV expressed by the autoreactive T cells In some embodiments, the subject has an autoimmune disease. In some embodiments, the CAR comprises a transmembrane domain as provided herein. In some embodiments, the CAR comprises an intracellular domain as provided herein.

[0576] Disclosed herein are methods of reducing or depleting autoreactive T cells in a subject comprising administering a CAR T cell comprising a CAR with an anti-TCRαV binding domain and/or an anti-TCRβV binding domain that binds to the TCRαV and/or TCRβV expressed by the autoreactive T cells. In some embodiments, the CAR T cell comprises a CAR comprising an anti-TCRαV binding domain that binds to the TCRαV expressed by the autoreactive T cells. In some embodiments, the CAR T cell comprises a CAR with an anti-TCRβV binding domain that binds to the TCRαV expressed by the autoreactive T cells In some embodiments, the subject has an autoimmune disease. In some embodiments, the CAR comprises a transmembrane domain as provided herein. In some embodiments, the CAR comprises an intracellular domain as provided herein.

### Cytokine Inhibitor Molecules

[0577] Cytokines are generally polypeptides that influence cellular activity, for example, through signal transduction pathways. Accordingly, a cytokine of the multispecific or multifunctional polypeptide is useful and can be associated with receptor-mediated signaling that transmits a signal from outside the cell membrane to modulate a response within the cell. Cytokines are proteinaceous signaling compounds that are mediators of the immune response. They control many different cellular functions including proliferation, differentiation and cell survival/apoptosis; cytokines are also involved in several pathophysiological processes including viral infections and autoimmune diseases. Cytokines are synthesized under various stimuli by a variety of cells of both the innate (monocytes, macrophages, dendritic cells) and adaptive (T- and B-cells) immune systems. Cytokines can be classified into two groups: pro- and anti-inflammatory. Pro-inflammatory cytokines, including IFNγ, IL-1, IL-6 and TNF-alpha, are predominantly derived from the innate immune cells and Th1 cells. Anti-inflammatory cytokines, including IL-10, IL-4, IL-13 and IL-5, are synthesized from Th2 immune cells.

### TGF-Beta Inhibitors

[0578] The present disclosure further provides, inter alia, TCR targeting molecules, that include, e.g., are engineered to contain, one or more cytokine inhibitor molecules, e.g., inhibitors of immunomodulatory (e.g., proinflammatory) cytokines and variants, e.g., functional variants, thereof. Accordingly, in some embodiments, the cytokine inhibitor molecule is a TGF-beta inhibitor. In some embodiments, the TGF-beta inhibitor binds to and inhibits TGF-beta, e.g., reduces the activity of TGF-beta. In some embodiments, the TGF-beta inhibitor inhibits (e.g., reduces the activity of) TGF-beta 1. In some embodiments, the TGF-beta inhibitor inhibits (e.g., reduces the activity of) TGF-beta 2. In some embodiments, the TGF-beta inhibitor inhibits (e.g., reduces the activity of) TGF-beta 3. In some embodiments, the TGF-beta inhibitor inhibits (e.g., reduces the activity of) TGF-beta 1 and TGF-beta 3. In some embodiments, the TGF-beta inhibitor inhibits (e.g., reduces the activity of) TGF-beta 1, TGF-beta 2, and TGF-beta 3.

[0579] In some embodiments, the TGF-beta inhibitor comprises a portion of a TGF-beta receptor (e.g., an extracellular domain of a TGF-beta receptor) that is capable of inhibiting (e.g., reducing the activity of) TGF-beta, or functional fragment or variant thereof. In some embodiments, the TGF-beta inhibitor comprises a TGFBR1 polypeptide (e.g., an extracellular domain of TGFBR1 or functional variant thereof). In some embodiments, the TGF-beta inhibitor comprises a TGFBR2 polypeptide (e.g., an extracellular domain of TGFBR2 or functional variant thereof). In some embodiments, the TGF-beta inhibitor comprises a TGFBR3 polypeptide (e.g., an extracellular domain of TGFBR3 or functional variant thereof). In some embodiments, the TGF-beta inhibitor comprises a TGFBR1 polypeptide (e.g., an extracellular domain of TGFBR1 or functional variant thereof) and a TGFBR2 polypeptide (e.g., an extracellular domain of TGFBR2 or functional variant thereof). In some embodiments, the TGF-beta inhibitor comprises a TGFBR1 polypeptide (e.g., an extracellular domain of TGFBR1 or functional variant thereof) and a TGFBR3 polypeptide (e.g., an extracellular domain of TGFBR3 or functional variant thereof). In some embodiments, the TGF-beta inhibitor comprises a TGFBR2 polypeptide (e.g., an extracellular domain of TGFBR2 or functional variant thereof) and a TGFBR3 polypeptide (e.g., an extracellular domain of TGFBR3 or functional variant thereof).

[0580] Exemplary TGF-beta receptor polypeptides that can be used as TGF-beta inhibitors have been disclosed in U.S. Pat. Nos. 8,993,524, 9,676,863, 8,658,135, US20150056199, US20070184052, and WO2017037634, all of which are herein incorporated by reference in their entirety.

[0581] In some embodiments, the TGF-beta inhibitor comprises an extracellular domain of TGFBR1 or a sequence substantially identical thereto (e.g., a sequence that is at least 80%, 85%, 90%, or 95% identical thereto). In some embodiments, the TGF-beta inhibitor comprises an extracellular domain of SEQ ID NO: 7257, or a sequence substantially identical thereto (e.g., a sequence that is at least 80%, 85%, 90%, or 95% identical thereto). In some embodiments, the TGF-beta inhibitor comprises an extracellular domain of SEQ ID NO: 7258, or a sequence substantially identical thereto (e.g., a sequence that is at least 80%, 85%, 90%, or 95% identical thereto). In some embodiments, the TGF-beta inhibitor comprises an extracellular domain of SEQ ID NO: 7259, or a sequence substantially identical thereto (e.g., a sequence that is at least 80%, 85%, 90%, or 95% identical thereto). In some embodiments, the TGF-beta inhibitor comprises the amino acid sequence of SEQ ID NO: 7266, or a sequence substantially identical thereto (e.g., a sequence that is at least 80%, 85%, 90%, or 95% identical thereto). In some embodiments, the TGF-beta inhibitor comprises the amino acid sequence of SEQ ID NO: 7267, or a sequence substantially identical thereto (e.g., a sequence that is at least 80%, 85%, 90%, or 95% identical thereto).

[0582] In some embodiments, the TGF-beta inhibitor comprises an extracellular domain of TGFBR2 or a sequence substantially identical thereto (e.g., a sequence that is at least 80%, 85%, 90%, or 95% identical thereto). In some embodiments, the TGF-beta inhibitor comprises an extracellular domain of SEQ ID NO: 7260, or a sequence substantially identical thereto (e.g., a sequence that is at least 80%, 85%, 90%, or 95% identical thereto). In some embodiments, the TGF-beta inhibitor comprises an extracellular domain of SEQ ID NO: 7261, or a sequence substantially identical thereto (e.g., a sequence that is at least 80%, 85%, 90%, or 95% identical thereto). In some embodiments, the TGF-beta inhibitor comprises the amino acid sequence of SEQ ID NO: 7262, or a sequence substantially identical thereto (e.g., a sequence that is at least 80%, 85%, 90%, or 95% identical thereto). In some embodiments, the TGF-beta inhibitor comprises the amino acid sequence of SEQ ID NO: 7263, or a sequence substantially identical thereto (e.g., a sequence that is at least 80%, 85%, 90%, or 95% identical thereto). In some embodiments, the TGF-beta inhibitor comprises the amino acid sequence of SEQ ID NO: 7264, or a sequence substantially identical thereto (e.g., a sequence that is at least 80%, 85%, 90%, or 95% identical thereto). In some embodiments, the TGF-beta inhibitor comprises the amino acid sequence of SEQ ID NO: 7265, or a sequence substantially identical thereto (e.g., a sequence that is at least 80%, 85%, 90%, or 95% identical thereto).

[0583] In some embodiments, the TGF-beta inhibitor comprises an extracellular domain of TGFBR3 or a sequence substantially identical thereto (e.g., a sequence that is at least 80%, 85%, 90%, or 95% identical thereto). In some embodiments, the TGF-beta inhibitor comprises an extracellular domain of SEQ ID NO: 7268, or a sequence substantially identical thereto (e.g., a sequence that is at least 80%, 85%, 90%, or 95% identical thereto). In some embodiments, the TGF-beta inhibitor comprises an extracellular domain of SEQ ID NO: 7269, or a sequence substantially identical thereto (e.g., a sequence that is at least 80%, 85%, 90%, or 95% identical thereto). In some embodiments, the TGF-beta inhibitor comprises the amino acid sequence of SEQ ID NO: 7270, or a sequence substantially identical thereto (e.g., a sequence that is at least 80%, 85%, 90%, or 95% identical thereto).

[0584] In some embodiments, the TGF-beta inhibitor comprises no more than one TGF-beta receptor extracellular domain. In some embodiments, the TGF-beta inhibitor comprises two or more (e.g., two, three, four, five, or more) TGF-beta receptor extracellular domains, linked together, e.g., via a linker.

### Immune Cell Engagers

[0585] The immune cell engagers of the TCR targeting molecules disclosed herein can mediate binding to, and/or activation of, an immune cell, e.g., an immune effector cell. In some embodiments, the immune cell is chosen from a T cell, an NK cell, a B cell, a dendritic cell, or a macrophage cell engager, or a combination thereof. In some embodiments, the immune cell engager is chosen from one, two, three, or all of a T cell engager, NK cell engager, a B cell engager, a dendritic cell engager, or a macrophage cell engager, or a combination thereof. The immune cell engager can be an agonist of the immune system. In some embodiments, the immune cell engager can be an antibody molecule, a ligand molecule (e.g., a ligand that further comprises an immunoglobulin constant region, e.g., an Fc region), a small molecule, a nucleotide molecule.

### Natural Killer Cell Engagers

[0586] Natural Killer (NK) cells recognize and destroy tumors and virus-infected cells in an antibody-independent manner. The regulation of NK cells is mediated by activating and inhibiting receptors on the NK cell surface. One family of activating receptors is the natural cytotoxicity receptors (NCRs) which include NKp30, NKp44 and NKp46. For example, the NCRs can initiate tumor targeting by recognition of heparan sulfate on cancer cells. NKG2D is a receptor that provides both stimulatory and costimulatory innate immune responses on activated killer (NK) cells, leading to cytotoxic activity. DNAM1 is a receptor involved in intercellular adhesion, lymphocyte signaling, cytotoxicity and lymphokine secretion mediated by cytotoxic T-lymphocyte (CTL) and NK cell. DAP10 (also known as HCST) is a transmembrane adapter protein which associates with KLRK1 to form an activation receptor KLRK1-HCST in lymphoid and myeloid cells; this receptor plays a major role in triggering cytotoxicity against target cells expressing cell surface ligands such as MHC class I chain-related MICA and MICB, and U(optionally L1)6-binding proteins (ULBPs); it KLRK1-HCST receptor plays a role in immune surveillance against tumors and is required for cytolysis of tumors cells; indeed, melanoma cells that do not express KLRK1 ligands escape from immune surveillance mediated by NK cells. CD16 is a receptor for the Fe region of IgG, which binds complexed or aggregated IgG and also monomeric IgG and thereby mediates antibody-dependent cellular cytotoxicity (ADCC) and other antibody-dependent responses, such as phagocytosis. Without wishing to be bound by theory, it is thought that NK cell engagers that bind, recruit, and/or activate receptors like those disclosed above (e.g., NKp30, NKp36, NKG2D, or CD16) may target immune system activity to a target cell, e.g., a cell comprising a TCRBV antigen (e.g., a TCRBV antigen corresponding to a biased TCRBV clonotype), e.g., promote cell death or lysis of a target cell.

[0587] The present disclosure provides, inter alia, TCR targeting molecules, that are engineered to contain one or more NK cell engagers that mediate binding to and/or activation of an NK cell. Accordingly, in some embodiments, the NK cell engager is selected from an antigen binding domain or ligand that binds to (e.g., activates): NKp30, NKp40, NKp44, NKp46, NKG2D, DNAM1, DAP10, CD16 (e.g., CD16a, CD16b, or both), CRTAM, CD27, PSGL1, CD96, CD100 (SEMA4D), NKp80, CD244 (also known as SLAMF4 or 2B4), SLAMF6, SLAMF7, KIR2DS2, KIR2DS4, KIR3DS1, KIR2DS3, KIR2DS5, KIR2DS1, CD94, NKG2C, NKG2E, or CD160.

[0588] In some embodiments, the NK cell engager is an antigen binding domain that binds to NKp30 (e.g., NKp30 present, e.g., expressed or displayed, on the surface of an NK cell) and comprises any CDR amino acid sequence, framework region (FWR) amino acid sequence, or variable region amino acid sequence disclosed in Tables 7-10. In some embodiments, the NK cell engager is an antigen binding domain that binds to NKp30 (e.g., NKp30 present, e.g., expressed or displayed, on the surface of an NK cell) and comprises any CDR amino acid sequence, framework region (FWR) amino acid sequence, or variable region amino acid sequence disclosed in U.S. Pat. Nos. 6,979,546, 9,447,185, PCT Application No. WO2015121383A1, PCT Application No. WO2016110468A1, PCT Application No. WO2004056392A1, or U.S. Application Publication No. US20070231322A1, the sequences of which are hereby incorporated by reference. In some embodiments, binding of the NK cell engager, e.g., antigen binding domain that binds to NKp30, to the NK cell activates the NK cell. An antigen binding domain that binds to NKp30 (e.g., NKp30 present, e.g., expressed or displayed, on the surface of an NK cell) may be said to target NKp30, the NK cell, or both.

[0589] In some embodiments, the antigen binding domain that binds to NKp30 comprises one or more CDRs (e.g., VHCDR1, VHCDR2, VHCDR3, VLCDR1, VLCDR2, and/or VLCDR3) disclosed in Table 7A, Table 7B, or Table 8A, or a sequence having at least 85%, 90%, 95%, or 99% identity thereto. In some embodiments, the antigen binding domain that binds to NKp30 comprises one or more framework regions (e.g., VHFWR1, VHFWR2, VHFWR3, VHFWR4, VLFWR1, VLFWR2, VLFWR3, and/or VLFWR4) disclosed in Table 7A, Table 7B, or Table 8A, or a sequence having at least 85%, 90%, 95%, or 99% identity thereto. In some embodiments, the antigen binding domain that binds to NKp30 comprises a VH and/or a VL disclosed in Table 9A, or a sequence having at least 85%, 90%, 95%, or 99% identity thereto. In some embodiments, any of the VH domains disclosed in Table 9A may be paired with any of the VL domains disclosed in Table 9A to form the antigen binding domain that binds to NKp30. In some embodiments, the antigen binding domain that binds to NKp30 comprises an amino acid sequence disclosed in Table 10A, or a sequence having at least 85%, 90%, 95%, or 99% identity thereto.

[0590] In some embodiments, the antigen binding domain that binds to NKp30 comprises a VH comprising a heavy chain complementarity determining region 1 (VHCDR1), a VHCDR2, and a VHCDR3, and a VL comprising a light chain complementarity determining region 1 (VLCDR1), a VLCDR2, and a VLCDR3.

[0591] In some embodiments, the VHCDR1, VHCDR2, and VHCDR3 comprise the amino acid sequences of SEQ ID NOs: 7313, 6001, and 7315, respectively (or a sequence having at least 85%, 90%, 95%, or 99% identity thereto). In some embodiments, the VHCDR1, VHCDR2, and VHCDR3 comprise the amino acid sequences of SEQ ID NOs: 7313, 6001, and 6002, respectively (or a sequence having at least 85%, 90%, 95%, or 99% identity thereto). In some embodiments, the VHCDR1, VHCDR2, and VHCDR3 comprise the amino acid sequences of SEQ ID NOs: 7313, 6008, and 6009, respectively (or a sequence having at least 85%, 90%, 95%, or 99% identity thereto). In some embodiments, the VHCDR1, VHCDR2, and VHCDR3 comprise the amino acid sequences of SEQ ID NOs: 7313, 7385, and 7315, respectively (or a sequence having at least 85%, 90%, 95%, or 99% identity thereto). In some embodiments, the VHCDR1, VHCDR2, and VHCDR3 comprise the amino acid sequences of SEQ ID NOs: 7313, 7318, and 6009, respectively (or a sequence having at least 85%, 90%, 95%, or 99% identity thereto).

[0592] In some embodiments, the VLCDR1, VLCDR2, and VLCDR3 comprise the amino acid sequences of SEQ ID NOs: 7326, 7327, and 7329, respectively (or a sequence having at least 85%, 90%, 95%, or 99% identity thereto). In some embodiments, the VLCDR1, VLCDR2, and VLCDR3 comprise the amino acid sequences of SEQ ID NOs: 6063, 6064, and 7293, respectively (or a sequence having at least 85%, 90%, 95%, or 99% identity thereto). In some embodiments, the VLCDR1, VLCDR2, and VLCDR3 comprise the amino acid sequences of SEQ ID NOs: 6070, 6071, and 6072, respectively (or a sequence having at least 85%, 90%, 95%, or 99% identity thereto). In some embodiments, the VLCDR1, VLCDR2, and VLCDR3 comprise the amino acid sequences of SEQ ID NOs: 6070, 6064, and 7321, respectively (or a sequence having at least 85%, 90%, 95%, or 99% identity thereto).

[0593] In some embodiments, the VHCDR1, VHCDR2, VHCDR3, VLCDR1, VLCDR2, and VLCDR3 comprise the amino acid sequences of SEQ ID NOs: 7313, 6001, 7315, 7326, 7327, and 7329, respectively (or a sequence having at least 85%, 90%, 95%, or 99% identity thereto). In some embodiments, the VHCDR1, VHCDR2, VHCDR3, VLCDR1, VLCDR2, and VLCDR3 comprise the amino acid sequences of SEQ ID NOs: 7313, 6001, 6002, 6063, 6064, and 7293, respectively (or a sequence having at least 85%, 90%, 95%, or 99% identity thereto). In some embodiments, the VHCDR1, VHCDR2, VHCDR3, VLCDR1, VLCDR2, and VLCDR3 comprise the amino acid sequences of SEQ ID NOs: 7313, 6008, 6009, 6070, 6071, and 6072, respectively (or a sequence having at least 85%, 90%, 95%, or 99% identity thereto). In some embodiments, the VHCDR1, VHCDR2, VHCDR3, VLCDR1, VLCDR2, and VLCDR3 comprise the amino acid sequences of SEQ ID NOs: 7313, 7385, 7315, 6070, 6064, and 7321, respectively (or a sequence having at least 85%, 90%, 95%, or 99% identity thereto). In some embodiments, the VHCDR1, VHCDR2, VHCDR3, VLCDR1, VLCDR2, and VLCDR3 comprise the amino acid sequences of SEQ ID NOs: 7313, 7318, 6009, 6070, 6064, and 7321, respectively (or a sequence having at least 85%, 90%, 95%, or 99% identity thereto).

[0594] In some embodiments, the VH comprises an amino acid sequence selected from the group consisting of SEQ ID NOs: 7298 or 7300-7304 (or a sequence having at least 85%, 90%, 95%, or 99% identity thereto) and/or the VL comprises an amino acid sequence selected from the group consisting of SEQ ID NOs: 7299 or 7305-7309 (or a sequence having at least 85%, 90%, 95%, or 99% identity thereto). In some embodiments, the VH and VL comprise the amino acid sequences of SEQ ID NOs: 7302 and 7305, respectively (or a sequence having at least 85%, 90%, 95%, or 99% identity thereto). In some embodiments, the VH and VL comprise the amino acid sequences of SEQ ID NOs: 7302 and 7309, respectively (or a sequence having at least 85%, 90%, 95%, or 99% identity thereto).

[0595] In some embodiments, the VH comprises an amino acid sequence selected from the group consisting of SEQ ID NOs: 6121 or 6123-6128 (or a sequence having at least 85%, 90%, 95%, or 99% identity thereto) and/or the VL comprises an amino acid sequence selected from the group consisting of SEQ ID NOs: 7294 or 6137-6141 (or a sequence having at least 85%, 90%, 95%, or 99% identity thereto). In some embodiments, the VH comprises an amino acid sequence selected from the group consisting of SEQ ID NOs: 6122 or 6129-6134 (or a sequence having at least 85%, 90%, 95%, or 99% identity thereto) and/or the VL comprises an amino acid sequence selected from the group consisting of SEQ ID NOs: 6136 or 6142-6147 (or a sequence having at least 85%, 90%, 95%, or 99% identity thereto). In some embodiments, the VH and VL comprise the amino acid sequences of SEQ ID NOs: 7295 and 7296, respectively (or a sequence having at least 85%, 90%, 95%, or 99% identity thereto). In some embodiments, the VH and VL comprise the amino acid sequences of SEQ ID NOs: 7297 and 7296, respectively (or a sequence having at least 85%, 90%, 95%, or 99% identity thereto). In some embodiments, the VH and VL comprise the amino acid sequences of SEQ ID NOs: 6122 and 6136, respectively (or a sequence having at least 85%, 90%, 95%, or 99% identity thereto).

[0596] In some embodiments, the antigen binding domain that binds to NKp30 comprises the amino acid sequence of SEQ ID NO: 7310 (or a sequence having at least 85%, 90%, 95%, or 99% identity thereto). In some embodiments, the antigen binding domain that binds to NKp30 comprises the amino acid sequence of SEQ ID NO: 7311 (or a sequence having at least 85%, 90%, 95%, or 99% identity thereto). In some embodiments, the antigen binding domain that binds to NKp30 comprises the amino acid sequence of SEQ ID NO: 6187, 6188, 6189 or 6190 (or a sequence having at least 85%, 90%, 95%, or 99% identity thereto). In some embodiments, the antigen binding domain that targets NKp30 comprises a VH comprising a heavy chain complementarity determining region 1 (VHCDR1) amino acid sequence of SEQ ID NO: 6000 (or a sequence with no more than 1, 2, 3, or 4 mutations, e.g., substitutions, additions, or deletions), a VHCDR2 amino acid sequence of SEQ ID NO: 6001 (or a sequence with no more than 1, 2, 3, or 4 mutations, e.g., substitutions, additions, or deletions), and/or a VHCDR3 amino acid sequence of SEQ ID NO: 6002 (or a sequence with no more than 1, 2, 3, or 4 mutations, e.g., substitutions, additions, or deletions). In some embodiments, the NKp30 antigen binding domain comprises a VH comprising a VHCDR1 amino acid sequence of SEQ ID NO: 6000, a VHCDR2 amino acid sequence of SEQ ID NO: 6001, and/or a VHCDR3 amino acid sequence of SEQ ID NO: 6002.

[0597] In some embodiments, the antigen binding domain that targets NKp30 comprises a VL comprising a light chain complementarity determining region 1 (VLCDR1) amino acid sequence of SEQ ID NO: 6063 (or a sequence with no more than 1, 2, 3, or 4 mutations, e.g., substitutions, additions, or deletions), a VLCDR2 amino acid sequence of SEQ ID NO: 6064 (or a sequence with no more than 1, 2, 3, or 4 mutations, e.g., substitutions, additions, or deletions), and/or a VLCDR3 amino acid sequence of SEQ ID NO: 7293 (or a sequence with no more than 1, 2, 3, or 4 mutations, e.g., substitutions, additions, or deletions). In some embodiments, the antigen binding domain that targets NKp30 comprises a VL comprising a VLCDR1 amino acid sequence of SEQ ID NO: 6063, a VLCDR2 amino acid sequence of SEQ ID NO: 6064, and a VLCDR3 amino acid sequence of SEQ ID NO: 7293.

[0598] In some embodiments, the antigen binding domain that targets NKp30 comprises a VH comprising a heavy chain complementarity determining region 1 (VHCDR1) amino acid sequence of SEQ ID NO: 6000 (or a sequence with no more than 1, 2, 3, or 4 mutations, e.g., substitutions, additions, or deletions), a VHCDR2 amino acid sequence of SEQ ID NO: 6001 (or a sequence with no more than 1, 2, 3, or 4 mutations, e.g., substitutions, additions, or deletions), and/or a VHCDR3 amino acid sequence of SEQ ID NO: 6002 (or a sequence with no more than 1, 2, 3, or 4 mutations, e.g., substitutions, additions, or deletions), and a VL comprising a light chain complementarity determining region 1 (VLCDR1) amino acid sequence of SEQ ID NO: 6063 (or a sequence with no more than 1, 2, 3, or 4 mutations, e.g., substitutions, additions, or deletions), a VLCDR2 amino acid sequence of SEQ ID NO: 6064 (or a sequence with no more than 1, 2, 3, or 4 mutations, e.g., substitutions, additions, or deletions), and/or a VLCDR3 amino acid sequence of SEQ ID NO: 7293 (or a sequence with no more than 1, 2, 3, or 4 mutations, e.g., substitutions, additions, or deletions). In some embodiments, the NKp30 antigen binding domain comprises a VH comprising a VHCDR1 amino acid sequence of SEQ ID NO: 6000, a VHCDR2 amino acid sequence of SEQ ID NO: 6001, and/or a VHCDR3 amino acid sequence of SEQ ID NO: 6002, and a VL comprising a VLCDR1 amino acid sequence of SEQ ID NO: 6063, a VLCDR2 amino acid sequence of SEQ ID NO: 6064, and a VLCDR3 amino acid sequence of SEQ ID NO: 7293.

[0599] In some embodiments, the antigen binding domain that targets NKp30 comprises a VH comprising a heavy chain complementarity determining region 1 (VHCDR1) amino acid sequence of SEQ ID NO: 6007 (or a sequence with no more than 1, 2, 3, or 4 mutations, e.g., substitutions, additions, or deletions), a VHCDR2 amino acid sequence of SEQ ID NO: 6008 (or a sequence with no more than 1, 2, 3, or 4 mutations, e.g., substitutions, additions, or deletions), and/or a VHCDR3 amino acid sequence of SEQ ID NO: 6009 (or a sequence with no more than 1, 2, 3, or 4 mutations, e.g., substitutions, additions, or deletions). In some embodiments, the NKp30 antigen binding domain comprises a VH comprising a VHCDR1 amino acid sequence of SEQ ID NO: 6007, a VHCDR2 amino acid sequence of SEQ ID NO: 6008, and/or a VHCDR3 amino acid sequence of SEQ ID NO: 6009.

[0600] In some embodiments, the antigen binding domain that targets NKp30 comprises a VL comprising a light chain complementarity determining region 1 (VLCDR1) amino acid sequence of SEQ ID NO: 6070 (or a sequence with no more than 1, 2, 3, or 4 mutations, e.g., substitutions, additions, or deletions), a VLCDR2 amino acid sequence of SEQ ID NO: 6071 (or a sequence with no more than 1, 2, 3, or 4 mutations, e.g., substitutions, additions, or deletions), and/or a VLCDR3 amino acid sequence of SEQ ID NO: 6072 (or a sequence with no more than 1, 2, 3, or 4 mutations, e.g., substitutions, additions, or deletions). In some embodiments, the antigen binding domain that targets NKp30 comprises a VL comprising a VLCDR1 amino acid sequence of SEQ ID NO: 6070, a VLCDR2 amino acid sequence of SEQ ID NO: 6071, and a VLCDR3 amino acid sequence of SEQ ID NO: 6072.

[0601] In some embodiments, the antigen binding domain that targets NKp30 comprises a VH comprising a heavy chain complementarity determining region 1 (VHCDR1) amino acid sequence of SEQ ID NO: 6007 (or a sequence with no more than 1, 2, 3, or 4 mutations, e.g., substitutions, additions, or deletions), a VHCDR2 amino acid sequence of SEQ ID NO: 6008 (or a sequence with no more than 1, 2, 3, or 4 mutations, e.g., substitutions, additions, or deletions), and/or a VHCDR3 amino acid sequence of SEQ ID NO: 6009 (or a sequence with no more than 1, 2, 3, or 4 mutations, e.g., substitutions, additions, or deletions), and a VL comprising a light chain complementarity determining region 1 (VLCDR1) amino acid sequence of SEQ ID NO: 6070 (or a sequence with no more than 1, 2, 3, or 4 mutations, e.g., substitutions, additions, or deletions), a VLCDR2 amino acid sequence of SEQ ID NO: 6071 (or a sequence with no more than 1, 2, 3, or 4 mutations, e.g., substitutions, additions, or deletions), and/or a VLCDR3 amino acid sequence of SEQ ID NO: 6072 (or a sequence with no more than 1, 2, 3, or 4 mutations, e.g., substitutions, additions, or deletions). In some embodiments, the NKp30 antigen binding domain comprises a VH comprising a VHCDR1 amino acid sequence of SEQ ID NO: 6007, a VHCDR2 amino acid sequence of SEQ ID NO: 6008, and/or a VHCDR3 amino acid sequence of SEQ ID NO: 6009, and a VL comprising a VLCDR1 amino acid sequence of SEQ ID NO: 6070, a VLCDR2 amino acid sequence of SEQ ID NO: 6071, and a VLCDR3 amino acid sequence of SEQ ID NO: 6072.

[0602] In some embodiments, the antigen binding domain that targets NKp30 comprises a VH comprising a heavy chain framework region 1 (VHFWR1) amino acid sequence of SEQ ID NO: 6003, a VHFWR2 amino acid sequence of SEQ ID NO: 6004, a VHFWR3 amino acid sequence of SEQ ID NO: 6005, and/or a VHFWR4 amino acid sequence of SEQ ID NO: 6006.

[0603] In some embodiments, the antigen binding domain that targets NKp30 comprises a VL comprising a light chain framework region 1 (VLFWR1) amino acid sequence of SEQ ID NO: 6066, a VLFWR2 amino acid sequence of SEQ ID NO: 6067, a VLFWR3 amino acid sequence of SEQ ID NO: 7292, and/or a VLFWR4 amino acid sequence of SEQ ID NO: 6069.

[0604] In some embodiments, the antigen binding domain that targets NKp30 comprises a VH comprising a heavy chain framework region 1 (VHFWR1) amino acid sequence of SEQ ID NO: 6003, a VHFWR2 amino acid sequence of SEQ ID NO: 6004, a VHFWR3 amino acid sequence of SEQ ID NO: 6005, and/or a VHFWR4 amino acid sequence of SEQ ID NO: 6006, and a VL comprising a light chain framework region 1 (VLFWR1) amino acid sequence of SEQ ID NO: 6066, a VLFWR2 amino acid sequence of SEQ ID NO: 6067, a VLFWR3 amino acid sequence of SEQ ID NO: 7292, and/or a VLFWR4 amino acid sequence of SEQ ID NO: 6069.

[0605] In some embodiments, the antigen binding domain that targets NKp30 comprises a VH comprising a VHFWR1 amino acid sequence of SEQ ID NO: 6003 (or a sequence with no more than 1, 2, 3, 4, 5, or 6 mutations, e.g., substitutions, additions, or deletions, therefrom), a VHFWR2 amino acid sequence of SEQ ID NO: 6004 (or a sequence with no more than 1, 2, 3, 4, 5, or 6 mutations, e.g., substitutions, additions, or deletions, therefrom), a VHFWR3 amino acid sequence of SEQ ID NO: 6005 (or a sequence with no more than 1, 2, 3, 4, 5, 6, 7, 8, 9, 10, or 11 mutations, e.g., substitutions, additions, or deletions), and/or a VHFWR4 amino acid sequence of SEQ ID NO: 6006.

[0606] In some embodiments, the antigen binding domain that targets NKp30 comprises a VL comprising a VLFWR1 amino acid sequence of SEQ ID NO: 6066 (or a sequence with no more than 1, 2, or 3 mutations, e.g., substitutions, additions, or deletions), a VLFWR2 amino acid sequence of SEQ ID NO: 6067 (or a sequence with no more than 1 mutation, e.g., substitution, addition, or deletion), a VLFWR3 amino acid sequence of SEQ ID NO: 7292 (or a sequence with no more than 1 mutation, e.g., substitution, addition, or deletion), and/or a VLFWR4 amino acid sequence of SEQ ID NO: 6069.

[0607] In some embodiments, the antigen binding domain that targets NKp30 comprises a VH comprising a VHFWR1 amino acid sequence of SEQ ID NO: 6003 (or a sequence with no more than 1, 2, 3, 4, 5, or 6 mutations, e.g., substitutions, additions, or deletions, therefrom), a VHFWR2 amino acid sequence of SEQ ID NO: 6004 (or a sequence with no more than 1, 2, 3, 4, 5, or 6 mutations, e.g., substitutions, additions, or deletions, therefrom), a VHFWR3 amino acid sequence of SEQ ID NO: 6005 (or a sequence with no more than 1, 2, 3, 4, 5, 6, 7, 8, 9, 10, or 11 mutations, e.g., substitutions, additions, or deletions), and/or a VHFWR4 amino acid sequence of SEQ ID NO: 6006, and a VL comprising a VLFWR1 amino acid sequence of SEQ ID NO: 6066 (or a sequence with no more than 1, 2, or 3 mutations, e.g., substitutions, additions, or deletions), a VLFWR2 amino acid sequence of SEQ ID NO: 6067 (or a sequence with no more than 1 mutation, e.g., substitution, addition, or deletion), a VLFWR3 amino acid sequence of SEQ ID NO: 7292 (or a sequence with no more than 1 mutation, e.g., substitution, addition, or deletion), and/or a VLFWR4 amino acid sequence of SEQ ID NO: 6069.

[0608] In some embodiments, the antigen binding domain that targets NKp30 comprises a VH comprising a heavy chain framework region 1 (VHFWR1) amino acid sequence of SEQ ID NO: 6010, a VHFWR2 amino acid sequence of SEQ ID NO: 6011, a VHFWR3 amino acid sequence of SEQ ID NO: 6012, and/or a VHFWR4 amino acid sequence of SEQ ID NO: 6013.

[0609] In some embodiments, the antigen binding domain that targets NKp30 comprises a VL comprising a light chain framework region 1 (VLFWR1) amino acid sequence of SEQ ID NO: 6073, a VLFWR2 amino acid sequence of SEQ ID NO: 6074, a VLFWR3 amino acid sequence of SEQ ID NO: 6075, and/or a VLFWR4 amino acid sequence of SEQ ID NO: 6076.

[0610] In some embodiments, the antigen binding domain that targets NKp30 comprises a VH comprising a heavy chain framework region 1 (VHFWR1) amino acid sequence of SEQ ID NO: 6010, a VHFWR2 amino acid sequence of SEQ ID NO: 6011, a VHFWR3 amino acid sequence of SEQ ID NO: 6012, and/or a VHFWR4 amino acid sequence of SEQ ID NO: 6013, and a VL comprising a light chain framework region 1 (VLFWR1) amino acid sequence of SEQ ID NO: 6073, a VLFWR2 amino acid sequence of SEQ ID NO: 6074, a VLFWR3 amino acid sequence of SEQ ID NO: 6075, and/or a VLFWR4 amino acid sequence of SEQ ID NO: 6076.

[0611] In some embodiments, the antigen binding domain that targets NKp30 comprises a VH comprising a VHFWR1 amino acid sequence of SEQ ID NO: 6010 (or a sequence with no more than 1, 2, 3, 4, 5, or 6 mutations, e.g., substitutions, additions, or deletions, therefrom), a VHFWR2 amino acid sequence of SEQ ID NO: 6011 (or a sequence with no more than 1, 2, 3, 4, 5, or 6 mutations, e.g., substitutions, additions, or deletions, therefrom), a VHFWR3 amino acid sequence of SEQ ID NO: 6012 (or a sequence with no more than 1, 2, 3, 4, 5, 6, 7, 8, 9, 10, or 11 mutations, e.g., substitutions, additions, or deletions), and/or a VHFWR4 amino acid sequence of SEQ ID NO: 6013.

[0612] In some embodiments, the antigen binding domain that targets NKp30 comprises a VL comprising a VLFWR1 amino acid sequence of SEQ ID NO: 6073 (or a sequence with no more than 1, 2, or 3 mutations, e.g., substitutions, additions, or deletions), a VLFWR2 amino acid sequence of SEQ ID NO: 6074 (or a sequence with no more than 1 mutation, e.g., substitution, addition, or deletion), a VLFWR3 amino acid sequence of SEQ ID NO: 6075 (or a sequence with no more than 1 mutation, e.g., substitution, addition, or deletion), and/or a VLFWR4 amino acid sequence of SEQ ID NO: 6076.

[0613] In some embodiments, the antigen binding domain that targets NKp30 comprises a VH comprising a VHFWR1 amino acid sequence of SEQ ID NO: 6010 (or a sequence with no more than 1, 2, 3, 4, 5, or 6 mutations, e.g., substitutions, additions, or deletions, therefrom), a VHFWR2 amino acid sequence of SEQ ID NO: 6011 (or a sequence with no more than 1, 2, 3, 4, 5, or 6 mutations, e.g., substitutions, additions, or deletions, therefrom), a VHFWR3 amino acid sequence of SEQ ID NO: 6012 (or a sequence with no more than 1, 2, 3, 4, 5, 6, 7, 8, 9, 10, or 11 mutations, e.g., substitutions, additions, or deletions), and/or a VHFWR4 amino acid sequence of SEQ ID NO: 6013, and a VL comprising a VLFWR1 amino acid sequence of SEQ ID NO: 6073 (or a sequence with no more than 1, 2, or 3 mutations, e.g., substitutions, additions, or deletions), a VLFWR2 amino acid sequence of SEQ ID NO: 6074 (or a sequence with no more than 1 mutation, e.g., substitution, addition, or deletion), a VLFWR3 amino acid sequence of SEQ ID NO: 6075 (or a sequence with no more than 1 mutation, e.g., substitution, addition, or deletion), and/or a VLFWR4 amino acid sequence of SEQ ID NO: 6076.

[0614] In some embodiments, the antigen binding domain that targets NKp30 comprises a VH comprising a heavy chain framework region 1 (VHFWR1) amino acid sequence of SEQ ID NO: 6014, a VHFWR2 amino acid sequence of SEQ ID NO: 6015, a VHFWR3 amino acid sequence of SEQ ID NO: 6016, and/or a VHFWR4 amino acid sequence of SEQ ID NO: 6017.

[0615] In some embodiments, the antigen binding domain that targets NKp30 comprises a VH comprising a VHFWR1 amino acid sequence of SEQ ID NO: 6014 (or a sequence with no more than 1, 2, 3, 4, 5, or 6 mutations, e.g., substitutions, additions, or deletions, therefrom), a VHFWR2 amino acid sequence of SEQ ID NO: 6015 (or a sequence with no more than 1, 2, 3, 4, 5, or 6 mutations, e.g., substitutions, additions, or deletions, therefrom), a VHFWR3 amino acid sequence of SEQ ID NO: 6016 (or a sequence with no more than 1, 2, 3, 4, 5, 6, 7, 8, 9, 10, or 11 mutations, e.g., substitutions, additions, or deletions), and/or a VHFWR4 amino acid sequence of SEQ ID NO: 6017.

[0616] In some embodiments, the antigen binding domain that targets NKp30 comprises a VL comprising a light chain framework region 1 (VLFWR1) amino acid sequence of SEQ ID NO: 6077, a VLFWR2 amino acid sequence of SEQ ID NO: 6078, a VLFWR3 amino acid sequence of SEQ ID NO: 6079, and/or a VLFWR4 amino acid sequence of SEQ ID NO: 6080.

[0617] In some embodiments, the antigen binding domain that targets NKp30 comprises a VL comprising a VLFWR1 amino acid sequence of SEQ ID NO: 6077 (or a sequence with no more than 1, 2, or 3 mutations, e.g., substitutions, additions, or deletions), a VLFWR2 amino acid sequence of SEQ ID NO: 6078 (or a sequence with no more than 1 mutation, e.g., substitution, addition, or deletion), a VLFWR3 amino acid sequence of SEQ ID NO: 6079 (or a sequence with no more than 1 mutation, e.g., substitution, addition, or deletion), and/or a VLFWR4 amino acid sequence of SEQ ID NO: 6080.

[0618] In some embodiments, the antigen binding domain that targets NKp30 comprises a VH comprising a heavy chain framework region 1 (VHFWR1) amino acid sequence of SEQ ID NO: 6018, a VHFWR2 amino acid sequence of SEQ ID NO: 6019, a VHFWR3 amino acid sequence of SEQ ID NO: 6020, and/or a VHFWR4 amino acid sequence of SEQ ID NO: 6021.

[0619] In some embodiments, the antigen binding domain that targets NKp30 comprises a VH comprising a VHFWR1 amino acid sequence of SEQ ID NO: 6018 (or a sequence with no more than 1, 2, 3, 4, 5, or 6 mutations, e.g., substitutions, additions, or deletions, therefrom), a VHFWR2 amino acid sequence of SEQ ID NO: 6019 (or a sequence with no more than 1, 2, 3, 4, 5, or 6 mutations, e.g., substitutions, additions, or deletions, therefrom), a VHFWR3 amino acid sequence of SEQ ID NO: 6020 (or a sequence with no more than 1, 2, 3, 4, 5, 6, 7, 8, 9, 10, or 11 mutations, e.g., substitutions, additions, or deletions), and/or a VHFWR4 amino acid sequence of SEQ ID NO: 6021.

[0620] In some embodiments, the antigen binding domain that targets NKp30 comprises a VL comprising a light chain framework region 1 (VLFWR1) amino acid sequence of SEQ ID NO: 6081, a VLFWR2 amino acid sequence of SEQ ID NO: 6082, a VLFWR3 amino acid sequence of SEQ ID NO: 6083, and/or a VLFWR4 amino acid sequence of SEQ ID NO: 6084.

[0621] In some embodiments, the antigen binding domain that targets NKp30 comprises a VL comprising a VLFWR1 amino acid sequence of SEQ ID NO: 6081 (or a sequence with no more than 1, 2, or 3 mutations, e.g., substitutions, additions, or deletions), a VLFWR2 amino acid sequence of SEQ ID NO: 6082 (or a sequence with no more than 1 mutation, e.g., substitution, addition, or deletion), a VLFWR3 amino acid sequence of SEQ ID NO: 6083 (or a sequence with no more than 1 mutation, e.g., substitution, addition, or deletion), and/or a VLFWR4 amino acid sequence of SEQ ID NO: 6084.

[0622] In some embodiments, the antigen binding domain that targets NKp30 comprises a VH comprising a heavy chain framework region 1 (VHFWR1) amino acid sequence of SEQ ID NO: 6022, a VHFWR2 amino acid sequence of SEQ ID NO: 6023, a VHFWR3 amino acid sequence of SEQ ID NO: 6024, and/or a VHFWR4 amino acid sequence of SEQ ID NO: 6025.

[0623] In some embodiments, the antigen binding domain that targets NKp30 comprises a VH comprising a VHFWR1 amino acid sequence of SEQ ID NO: 6022 (or a sequence with no more than 1, 2, 3, 4, 5, or 6 mutations, e.g., substitutions, additions, or deletions, therefrom), a VHFWR2 amino acid sequence of SEQ ID NO: 6023 (or a sequence with no more than 1, 2, 3, 4, 5, or 6 mutations, e.g., substitutions, additions, or deletions, therefrom), a VHFWR3 amino acid sequence of SEQ ID NO: 6024 (or a sequence with no more than 1, 2, 3, 4, 5, 6, 7, 8, 9, 10, or 11 mutations, e.g., substitutions, additions, or deletions), and/or a VHFWR4 amino acid sequence of SEQ ID NO: 6025.

[0624] In some embodiments, the antigen binding domain that targets NKp30 comprises a VL comprising a light chain framework region 1 (VLFWR1) amino acid sequence of SEQ ID NO: 6085, a VLFWR2 amino acid sequence of SEQ ID NO: 6086, a VLFWR3 amino acid sequence of SEQ ID NO: 6087, and/or a VLFWR4 amino acid sequence of SEQ ID NO: 6088.

[0625] In some embodiments, the antigen binding domain that targets NKp30 comprises a VL comprising a VLFWR1 amino acid sequence of SEQ ID NO: 6085 (or a sequence with no more than 1, 2, or 3 mutations, e.g., substitutions, additions, or deletions), a VLFWR2 amino acid sequence of SEQ ID NO: 6086 (or a sequence with no more than 1 mutation, e.g., substitution, addition, or deletion), a VLFWR3 amino acid sequence of SEQ ID NO: 6087 (or a sequence with no more than 1 mutation, e.g., substitution, addition, or deletion), and/or a VLFWR4 amino acid sequence of SEQ ID NO: 6088.

[0626] In some embodiments, the antigen binding domain that targets NKp30 comprises a VH comprising a heavy chain framework region 1 (VHFWR1) amino acid sequence of SEQ ID NO: 6026, a VHFWR2 amino acid sequence of SEQ ID NO: 6027, a VHFWR3 amino acid sequence of SEQ ID NO: 6028, and/or a VHFWR4 amino acid sequence of SEQ ID NO: 6029.

[0627] In some embodiments, the antigen binding domain that targets NKp30 comprises a VH comprising a VHFWR1 amino acid sequence of SEQ ID NO: 6026 (or a sequence with no more than 1, 2, 3, 4, 5, or 6 mutations, e.g., substitutions, additions, or deletions, therefrom), a VHFWR2 amino acid sequence of SEQ ID NO: 6027 (or a sequence with no more than 1, 2, 3, 4, 5, or 6 mutations, e.g., substitutions, additions, or deletions, therefrom), a VHFWR3 amino acid sequence of SEQ ID NO: 6028 (or a sequence with no more than 1, 2, 3, 4, 5, 6, 7, 8, 9, 10, or 11 mutations, e.g., substitutions, additions, or deletions), and/or a VHFWR4 amino acid sequence of SEQ ID NO: 6029.

[0628] In some embodiments, the antigen binding domain that targets NKp30 comprises a VL comprising a light chain framework region 1 (VLFWR1) amino acid sequence of SEQ ID NO: 6089, a VLFWR2 amino acid sequence of SEQ ID NO: 6090, a VLFWR3 amino acid sequence of SEQ ID NO: 6091, and/or a VLFWR4 amino acid sequence of SEQ ID NO: 6092.

[0629] In some embodiments, the antigen binding domain that targets NKp30 comprises a VL comprising a VLFWR1 amino acid sequence of SEQ ID NO: 6089 (or a sequence with no more than 1, 2, or 3 mutations, e.g., substitutions, additions, or deletions), a VLFWR2 amino acid sequence of SEQ ID NO: 6090 (or a sequence with no more than 1 mutation, e.g., substitution, addition, or deletion), a VLFWR3 amino acid sequence of SEQ ID NO: 6091 (or a sequence with no more than 1 mutation, e.g., substitution, addition, or deletion), and/or a VLFWR4 amino acid sequence of SEQ ID NO: 6092.

[0630] In some embodiments, the antigen binding domain that targets NKp30 comprises a VH comprising a heavy chain framework region 1 (VHFWR1) amino acid sequence of SEQ ID NO: 6030, a VHFWR2 amino acid sequence of SEQ ID NO: 6032, a VHFWR3 amino acid sequence of SEQ ID NO: 6033, and/or a VHFWR4 amino acid sequence of SEQ ID NO: 6034.

[0631] In some embodiments, the antigen binding domain that targets NKp30 comprises a VH comprising a VHFWR1 amino acid sequence of SEQ ID NO: 6030 (or a sequence with no more than 1, 2, 3, 4, 5, or 6 mutations, e.g., substitutions, additions, or deletions, therefrom), a VHFWR2 amino acid sequence of SEQ ID NO: 6032 (or a sequence with no more than 1, 2, 3, 4, 5, or 6 mutations, e.g., substitutions, additions, or deletions, therefrom), a VHFWR3 amino acid sequence of SEQ ID NO: 6033 (or a sequence with no more than 1, 2, 3, 4, 5, 6, 7, 8, 9, 10, or 11 mutations, e.g., substitutions, additions, or deletions), and/or a VHFWR4 amino acid sequence of SEQ ID NO: 6034.

[0632] In some embodiments, the antigen binding domain that targets NKp30 comprises a VL comprising a light chain framework region 1 (VLFWR1) amino acid sequence of SEQ ID NO: 6093, a VLFWR2 amino acid sequence of SEQ ID NO: 6094, a VLFWR3 amino acid sequence of SEQ ID NO: 6095, and/or a VLFWR4 amino acid sequence of SEQ ID NO: 6096.

[0633] In some embodiments, the antigen binding domain that targets NKp30 comprises a VL comprising a VLFWR1 amino acid sequence of SEQ ID NO: 6093 (or a sequence with no more than 1, 2, or 3 mutations, e.g., substitutions, additions, or deletions), a VLFWR2 amino acid sequence of SEQ ID NO: 6094 (or a sequence with no more than 1 mutation, e.g., substitution, addition, or deletion), a VLFWR3 amino acid sequence of SEQ ID NO: 6095 (or a sequence with no more than 1 mutation, e.g., substitution, addition, or deletion), and/or a VLFWR4 amino acid sequence of SEQ ID NO: 6096.

[0634] In some embodiments, the antigen binding domain that targets NKp30 comprises a VH comprising a heavy chain framework region 1 (VHFWR1) amino acid sequence of SEQ ID NO: 6035, a VHFWR2 amino acid sequence of SEQ ID NO: 6036, a VHFWR3 amino acid sequence of SEQ ID NO: 6037, and/or a VHFWR4 amino acid sequence of SEQ ID NO: 6038.

[0635] In some embodiments, the antigen binding domain that targets NKp30 comprises a VH comprising a VHFWR1 amino acid sequence of SEQ ID NO: 6035 (or a sequence with no more than 1, 2, 3, 4, 5, or 6 mutations, e.g., substitutions, additions, or deletions, therefrom), a VHFWR2 amino acid sequence of SEQ ID NO: 6036 (or a sequence with no more than 1, 2, 3, 4, 5, or 6 mutations, e.g., substitutions, additions, or deletions, therefrom), a VHFWR3 amino acid sequence of SEQ ID NO: 6037 (or a sequence with no more than 1, 2, 3, 4, 5, 6, 7, 8, 9, 10, or 11 mutations, e.g., substitutions, additions, or deletions), and/or a VHFWR4 amino acid sequence of SEQ ID NO: 6038.

[0636] In some embodiments, the antigen binding domain that targets NKp30 comprises a VH comprising a heavy chain framework region 1 (VHFWR1) amino acid sequence of SEQ ID NO: 6039, a VHFWR2 amino acid sequence of SEQ ID NO: 6040, a VHFWR3 amino acid sequence of SEQ ID NO: 6041, and/or a VHFWR4 amino acid sequence of SEQ ID NO: 6042.

[0637] In some embodiments, the antigen binding domain that targets NKp30 comprises a VH comprising a VHFWR1 amino acid sequence of SEQ ID NO: 6039 (or a sequence with no more than 1, 2, 3, 4, 5, or 6 mutations, e.g., substitutions, additions, or deletions, therefrom), a VHFWR2 amino acid sequence of SEQ ID NO: 6040 (or a sequence with no more than 1, 2, 3, 4, 5, or 6 mutations, e.g., substitutions, additions, or deletions, therefrom), a VHFWR3 amino acid sequence of SEQ ID NO: 6041 (or a sequence with no more than 1, 2, 3, 4, 5, 6, 7, 8, 9, 10, or 11 mutations, e.g., substitutions, additions, or deletions), and/or a VHFWR4 amino acid sequence of SEQ ID NO: 6042.

[0638] In some embodiments, the antigen binding domain that targets NKp30 comprises a VL comprising a light chain framework region 1 (VLFWR1) amino acid sequence of SEQ ID NO: 6097, a VLFWR2 amino acid sequence of SEQ ID NO: 6098, a VLFWR3 amino acid sequence of SEQ ID NO: 6099, and/or a VLFWR4 amino acid sequence of SEQ ID NO: 6100.

[0639] In some embodiments, the antigen binding domain that targets NKp30 comprises a VL comprising a VLFWR1 amino acid sequence of SEQ ID NO: 6097 (or a sequence with no more than 1, 2, or 3 mutations, e.g., substitutions, additions, or deletions), a VLFWR2 amino acid sequence of SEQ ID NO: 6098 (or a sequence with no more than 1 mutation, e.g., substitution, addition, or deletion), a VLFWR3 amino acid sequence of SEQ ID NO: 6099 (or a sequence with no more than 1 mutation, e.g., substitution, addition, or deletion), and/or a VLFWR4 amino acid sequence of SEQ ID NO: 6100.

[0640] In some embodiments, the antigen binding domain that targets NKp30 comprises a VH comprising a heavy chain framework region 1 (VHFWR1) amino acid sequence of SEQ ID NO: 6043, a VHFWR2 amino acid sequence of SEQ ID NO: 6044, a VHFWR3 amino acid sequence of SEQ ID NO: 6045, and/or a VHFWR4 amino acid sequence of SEQ ID NO: 6046.

[0641] In some embodiments, the antigen binding domain that targets NKp30 comprises a VH comprising a VHFWR1 amino acid sequence of SEQ ID NO: 6043 (or a sequence with no more than 1, 2, 3, 4, 5, or 6 mutations, e.g., substitutions, additions, or deletions, therefrom), a VHFWR2 amino acid sequence of SEQ ID NO: 6044 (or a sequence with no more than 1, 2, 3, 4, 5, or 6 mutations, e.g., substitutions, additions, or deletions, therefrom), a VHFWR3 amino acid sequence of SEQ ID NO: 6045 (or a sequence with no more than 1, 2, 3, 4, 5, 6, 7, 8, 9, 10, or 11 mutations, e.g., substitutions, additions, or deletions), and/or a VHFWR4 amino acid sequence of SEQ ID NO: 6046.

[0642] In some embodiments, the antigen binding domain that targets NKp30 comprises a VL comprising a light chain framework region 1 (VLFWR1) amino acid sequence of SEQ ID NO: 6101, a VLFWR2 amino acid sequence of SEQ ID NO: 6102, a VLFWR3 amino acid sequence of SEQ ID NO: 6103, and/or a VLFWR4 amino acid sequence of SEQ ID NO: 6104.

[0643] In some embodiments, the antigen binding domain that targets NKp30 comprises a VL comprising a VLFWR1 amino acid sequence of SEQ ID NO: 6101 (or a sequence with no more than 1, 2, or 3 mutations, e.g., substitutions, additions, or deletions), a VLFWR2 amino acid sequence of SEQ ID NO: 6102 (or a sequence with no more than 1 mutation, e.g., substitution, addition, or deletion), a VLFWR3 amino acid sequence of SEQ ID NO: 6103 (or a sequence with no more than 1 mutation, e.g., substitution, addition, or deletion), and/or a VLFWR4 amino acid sequence of SEQ ID NO: 6104.

[0644] In some embodiments, the antigen binding domain that targets NKp30 comprises a VH comprising a heavy chain framework region 1 (VHFWR1) amino acid sequence of SEQ ID NO: 6047, a VHFWR2 amino acid sequence of SEQ ID NO: 6048, a VHFWR3 amino acid sequence of SEQ ID NO: 6049, and/or a VHFWR4 amino acid sequence of SEQ ID NO: 6050.

[0645] In some embodiments, the antigen binding domain that targets NKp30 comprises a VH comprising a VHFWR1 amino acid sequence of SEQ ID NO: 6047 (or a sequence with no more than 1, 2, 3, 4, 5, or 6 mutations, e.g., substitutions, additions, or deletions, therefrom), a VHFWR2 amino acid sequence of SEQ ID NO: 6048 (or a sequence with no more than 1, 2, 3, 4, 5, or 6 mutations, e.g., substitutions, additions, or deletions, therefrom), a VHFWR3 amino acid sequence of SEQ ID NO: 6049 (or a sequence with no more than 1, 2, 3, 4, 5, 6, 7, 8, 9, 10, or 11 mutations, e.g., substitutions, additions, or deletions), and/or a VHFWR4 amino acid sequence of SEQ ID NO: 6050.

[0646] In some embodiments, the antigen binding domain that targets NKp30 comprises a VL comprising a light chain framework region 1 (VLFWR1) amino acid sequence of SEQ ID NO: 6105, a VLFWR2 amino acid sequence of SEQ ID NO: 6106, a VLFWR3 amino acid sequence of SEQ ID NO: 6107, and/or a VLFWR4 amino acid sequence of SEQ ID NO: 6108.

[0647] In some embodiments, the antigen binding domain that targets NKp30 comprises a VL comprising a VLFWR1 amino acid sequence of SEQ ID NO: 6105 (or a sequence with no more than 1, 2, or 3 mutations, e.g., substitutions, additions, or deletions), a VLFWR2 amino acid sequence of SEQ ID NO: 6106 (or a sequence with no more than 1 mutation, e.g., substitution, addition, or deletion), a VLFWR3 amino acid sequence of SEQ ID NO: 6107 (or a sequence with no more than 1 mutation, e.g., substitution, addition, or deletion), and/or a VLFWR4 amino acid sequence of SEQ ID NO: 6108.

[0648] In some embodiments, the antigen binding domain that targets NKp30 comprises a VH comprising a heavy chain framework region 1 (VHFWR1) amino acid sequence of SEQ ID NO: 6051, a VHFWR2 amino acid sequence of SEQ ID NO: 6052, a VHFWR3 amino acid sequence of SEQ ID NO: 6053, and/or a VHFWR4 amino acid sequence of SEQ ID NO: 6054.

[0649] In some embodiments, the antigen binding domain that targets NKp30 comprises a VH comprising a VHFWR1 amino acid sequence of SEQ ID NO: 6051 (or a sequence with no more than 1, 2, 3, 4, 5, or 6 mutations, e.g., substitutions, additions, or deletions, therefrom), a VHFWR2 amino acid sequence of SEQ ID NO: 6052 (or a sequence with no more than 1, 2, 3, 4, 5, or 6 mutations, e.g., substitutions, additions, or deletions, therefrom), a VHFWR3 amino acid sequence of SEQ ID NO: 6053 (or a sequence with no more than 1, 2, 3, 4, 5, 6, 7, 8, 9, 10, or 11 mutations, e.g., substitutions, additions, or deletions), and/or a VHFWR4 amino acid sequence of SEQ ID NO: 6054.

[0650] In some embodiments, the antigen binding domain that targets NKp30 comprises a VL comprising a light chain framework region 1 (VLFWR1) amino acid sequence of SEQ ID NO: 6109, a VLFWR2 amino acid sequence of SEQ ID NO: 6110, a VLFWR3 amino acid sequence of SEQ ID NO: 6111, and/or a VLFWR4 amino acid sequence of SEQ ID NO: 6112.

[0651] In some embodiments, the antigen binding domain that targets NKp30 comprises a VL comprising a VLFWR1 amino acid sequence of SEQ ID NO: 6109 (or a sequence with no more than 1, 2, or 3 mutations, e.g., substitutions, additions, or deletions), a VLFWR2 amino acid sequence of SEQ ID NO: 6110 (or a sequence with no more than 1 mutation, e.g., substitution, addition, or deletion), a VLFWR3 amino acid sequence of SEQ ID NO: 6111 (or a sequence with no more than 1 mutation, e.g., substitution, addition, or deletion), and/or a VLFWR4 amino acid sequence of SEQ ID NO: 6112.

[0652] In some embodiments, the antigen binding domain that targets NKp30 comprises a VH comprising a heavy chain framework region 1 (VHFWR1) amino acid sequence of SEQ ID NO: 6055, a VHFWR2 amino acid sequence of SEQ ID NO: 6056, a VHFWR3 amino acid sequence of SEQ ID NO: 6057, and/or a VHFWR4 amino acid sequence of SEQ ID NO: 6058.

[0653] In some embodiments, the antigen binding domain that targets NKp30 comprises a VH comprising a VHFWR1 amino acid sequence of SEQ ID NO: 6055 (or a sequence with no more than 1, 2, 3, 4, 5, or 6 mutations, e.g., substitutions, additions, or deletions, therefrom), a VHFWR2 amino acid sequence of SEQ ID NO: 6056 (or a sequence with no more than 1, 2, 3, 4, 5, or 6 mutations, e.g., substitutions, additions, or deletions, therefrom), a VHFWR3 amino acid sequence of SEQ ID NO: 6057 (or a sequence with no more than 1, 2, 3, 4, 5, 6, 7, 8, 9, 10, or 11 mutations, e.g., substitutions, additions, or deletions), and/or a VHFWR4 amino acid sequence of SEQ ID NO: 6058.

[0654] In some embodiments, the antigen binding domain that targets NKp30 comprises a VL comprising a light chain framework region 1 (VLFWR1) amino acid sequence of SEQ ID NO: 6113, a VLFWR2 amino acid sequence of SEQ ID NO: 6114, a VLFWR3 amino acid sequence of SEQ ID NO: 6115, and/or a VLFWR4 amino acid sequence of SEQ ID NO: 6116.

[0655] In some embodiments, the antigen binding domain that targets NKp30 comprises a VL comprising a VLFWR1 amino acid sequence of SEQ ID NO: 6113 (or a sequence with no more than 1, 2, or 3 mutations, e.g., substitutions, additions, or deletions), a VLFWR2 amino acid sequence of SEQ ID NO: 6114 (or a sequence with no more than 1 mutation, e.g., substitution, addition, or deletion), a VLFWR3 amino acid sequence of SEQ ID NO: 6115 (or a sequence with no more than 1 mutation, e.g., substitution, addition, or deletion), and/or a VLFWR4 amino acid sequence of SEQ ID NO: 6116.

[0656] In some embodiments, the antigen binding domain that targets NKp30 comprises a VH comprising a heavy chain framework region 1 (VHFWR1) amino acid sequence of SEQ ID NO: 6059, a VHFWR2 amino acid sequence of SEQ ID NO: 6060, a VHFWR3 amino acid sequence of SEQ ID NO: 6061, and/or a VHFWR4 amino acid sequence of SEQ ID NO: 6062.

[0657] In some embodiments, the antigen binding domain that targets NKp30 comprises a VH comprising a VHFWR1 amino acid sequence of SEQ ID NO: 6059 (or a sequence with no more than 1, 2, 3, 4, 5, or 6 mutations, e.g., substitutions, additions, or deletions, therefrom), a VHFWR2 amino acid sequence of SEQ ID NO: 6060 (or a sequence with no more than 1, 2, 3, 4, 5, or 6 mutations, e.g., substitutions, additions, or deletions, therefrom), a VHFWR3 amino acid sequence of SEQ ID NO: 6061 (or a sequence with no more than 1, 2, 3, 4, 5, 6, 7, 8, 9, 10, or 11 mutations, e.g., substitutions, additions, or deletions), and/or a VHFWR4 amino acid sequence of SEQ ID NO: 6062.

[0658] In some embodiments, the antigen binding domain that targets NKp30 comprises a VL comprising a light chain framework region 1 (VLFWR1) amino acid sequence of SEQ ID NO: 6117, a VLFWR2 amino acid sequence of SEQ ID NO: 6118, a VLFWR3 amino acid sequence of SEQ ID NO: 6119, and/or a VLFWR4 amino acid sequence of SEQ ID NO: 6120.

[0659] In some embodiments, the antigen binding domain that targets NKp30 comprises a VL comprising a VLFWR1 amino acid sequence of SEQ ID NO: 6117 (or a sequence with no more than 1, 2, or 3 mutations, e.g., substitutions, additions, or deletions), a VLFWR2 amino acid sequence of SEQ ID NO: 6118 (or a sequence with no more than 1 mutation, e.g., substitution, addition, or deletion), a VLFWR3 amino acid sequence of SEQ ID NO: 6119 (or a sequence with no more than 1 mutation, e.g., substitution, addition, or deletion), and/or a VLFWR4 amino acid sequence of SEQ ID NO: 6120.

[0660] In some embodiments, the antigen binding domain that targets NKp30 comprises a VH comprising the amino acid sequence of SEQ ID NO: 6148 (or an amino acid sequence having at least about 77%, 80%, 85%, 90%, 95%, or 99% sequence identity to SEQ ID NO: 6148). In some embodiments, the antigen binding domain that targets NKp30 comprises a VH comprising the amino acid sequence of SEQ ID NO: 6149 (or an amino acid sequence having at least about 77%, 80%, 85%, 90%, 95%, or 99% sequence identity to SEQ ID NO: 6149). In some embodiments, the antigen binding domain that targets NKp30 comprises a VL comprising the amino acid sequence of SEQ ID NO: 6150 (or an amino acid sequence having at least about 93%, 95%, or 99% sequence identity to SEQ ID NO: 6150). In some embodiments, antigen binding domain that targets NKp30 comprises a VH comprising the amino acid sequence of SEQ ID NO: 6148. In some embodiments, antigen binding domain that targets NKp30 comprises a VH comprising the amino acid sequence of SEQ ID NO: 6149. In some embodiments, the antigen binding domain that targets NKp30 comprises a VL comprising the amino acid sequence of SEQ ID NO: 6150.

[0661] In some embodiments, the antigen binding domain that targets NKp30 comprises a VH comprising the amino acid sequence of SEQ ID NO: 6148, and a VL comprising the amino acid sequence of SEQ ID NO: 6150. In some embodiments, the antigen binding domain that targets NKp30 comprises a VH comprising the amino acid sequence of SEQ ID NO: 6149, and a VL comprising the amino acid sequence of SEQ ID NO: 6150.

[0662] In some embodiments, the antigen binding domain that targets NKp30 comprises a VH comprising the amino acid sequence of SEQ ID NO: 6151 (or an amino acid sequence having at least about 77%, 80%, 85%, 90%, 95%, or 99% sequence identity to SEQ ID NO: 6151). In some embodiments, the antigen binding domain that targets NKp30 comprises a VH comprising the amino acid sequence of SEQ ID NO: 6152 (or an amino acid sequence having at least about 77%, 80%, 85%, 90%, 95%, or 99% sequence identity to SEQ ID NO: 6152). In some embodiments, the antigen binding domain that targets NKp30 comprises a VL comprising the amino acid sequence of SEQ ID NO: 6153 (or an amino acid sequence having at least about 93%, 95%, or 99% sequence identity to SEQ ID NO: 6153). In some embodiments, antigen binding domain that targets NKp30 comprises a VH comprising the amino acid sequence of SEQ ID NO: 6151. In some embodiments, antigen binding domain that targets NKp30 comprises a VH comprising the amino acid sequence of SEQ ID NO: 6152. In some embodiments, the antigen binding domain that targets NKp30 comprises a VL comprising the amino acid sequence of SEQ ID NO: 6153.

[0663] In some embodiments, the antigen binding domain that targets NKp30 comprises a VH comprising the amino acid sequence of SEQ ID NO: 6151, and a VL comprising the amino acid sequence of SEQ ID NO: 6153. In some embodiments, the antigen binding domain that targets NKp30 comprises a VH comprising the amino acid sequence of SEQ ID NO: 6152, and a VL comprising the amino acid sequence of SEQ ID NO: 6153.

[0664] In some embodiments, the antigen binding domain that targets NKp30 comprises an scFv. In some embodiments, the scFv comprises an amino acid sequence selected from SEQ ID NOs: 6187-6190, or an amino acid sequence having at least about 93%, 95%, or 99% sequence identity thereto.

TABLE 7A
Exemplary heavy chain CDRs and FWRs of NKp30-targeting antigen binding domains

| Ab ID | VHFWR1 | VHCDR1 | VHFWR2 | VHCDR2 | VHFWR3 | VHCDR3 | VHFWR4 |
|---|---|---|---|---|---|---|---|
| 9G1-HC | QIQLQES | TGGYHW | WIRQFP | YIYSSGS | RISITRDT | GNWHYF | WGQGT |
| | GPGLVK | N (SEQ ID | GKKLEW | TSYNPSL | SKNQFFL | DF (SEQ | MVTVSS |
| | PSQSLSL | NO: 6000) | MG (SEQ | KS (SEQ | QLNSVT | ID NO: | (SEQ ID |
| | TCSVTGF | | ID NO: | ID NO: | TEDTAT | 6002) | NO: 6006) |
| | SIN (SEQ | | 6004) | 6001) | YYCAR | | |
| | ID NO: | | | | (SEQ ID | | |
| | 6003) | | | | NO: 6005) | | |
| 15H6- | QIQLQES | TGGYHW | WIRQFP | YIYSSGT | RISITRDT | GNWHYF | WGQGTL |
| HC | GPGLVK | N (SEQ ID | GKKLEW | TRYNPSL | SKNQFFL | DY (SEQ | VAVSS |
| | PSQSLSL | NO: 6007) | MG (SEQ | KS (SEQ | QLNSVT | ID NO: | (SEQ ID |
| | TCSVTGF | | ID NO: | ID NO: | PEDTAT | 6009) | NO: 6013) |
| | SIN (SEQ | | 6011) | 6008) | YYCTR | | |
| | ID NO: | | | | (SEQ ID | | |
| | 6010) | | | | NO: 6012) | | |
| 9G1- | QIQLQES | TGGYHW | WIRQPA | YIYSSGS | RVTMSR | GNWHYF | WGQGT |
| HC_1 | GPGLVK | N (SEQ ID | GKGLEW | TSYNPSL | DTSKNQ | DF (SEQ | MVTVSS |
| | PSETLSL | NO: 6000) | IG (SEQ | KS (SEQ | FSLKLSS | ID NO: | (SEQ ID |
| | TCTVSGF | | ID NO: | ID NO: | VTAADT | 6002) | NO: 6017) |
| | SIN (SEQ | | 6015) | 6001) | AVYYCA | | |
| | ID NO: | | | | R (SEQ ID | | |
| | 6014) | | | | NO: 6016) | | |
| 9G1- | QIQLQES | TGGYHW | WIRQHP | YIYSSGS | LVTISRD | GNWHYF | WGQGT |
| | GPGLVK | N (SEQ ID | GKGLEW | TSYNPSL | TSKNQFS | DF (SEQ | MVTVSS |
| HC_2 | PSQTLSL | NO: 6000) | IG (SEQ | KS (SEQ | LKLSSVT | ID NO: | (SEQ ID |
| | TCTVSGF | | ID NO: | ID NO: | AADTAV | 6002) | NO: 6021) |
| | SIN (SEQ | | 6019) | 6001) | YYCAR | | |
| | ID NO: | | | | (SEQ ID | | |
| | 6018) | | | | NO: 6020) | | |
| 9G1- | EIQLLES | TGGYHW | WVRQAP | YIYSSGS | RFTISRD | GNWHYF | WGQGT |
| HC_3 | GGGLVQ | N (SEQ ID | GKGLEW | TSYNPSL | TSKNTF | DF (SEQ | MVTVSS |
| | PGGSLRL | NO: 6000) | VG (SEQ | KS (SEQ | YLQMNS | ID NO: | (SEQ ID |
| | SCAVSG | | ID NO: | ID NO: | LRAEDT | 6002) | NO: 6025) |
| | FSIN | | 6023) | 6001) | AVYYCA | | |
| | (SEQ ID | | | | R (SEQ ID | | |
| | NO: 6022) | | | | NO: 6024) | | |
| 9G1- | QIQLVQS | TGGYHW | WVRQAP | YIYSSGS | RVTITRD | GNWHYF | WGQGT |
| HC_4 | GAEVKK | N (SEQ ID | GQGLEW | TSYNPSL | TSTNTFY | DF (SEQ | MVTVSS |
| | PGSSVK | NO: 6000) | MG (SEQ | KS (SEQ | MELSSL | ID NO: | (SEQ ID |
| | VSCKVS | | ID NO: | ID NO: | RSEDTA | 6002) | NO: 6029) |
| | GFSIN | | 6027) | 6001) | VYYCAR | | |
| | (SEQ ID | | | | (SEQ ID | | |
| | NO: 6026) | | | | NO: 6028) | | |
| 9G1- | EIQLVES | TGGYHW | WVRQAP | YIYSSGS | RFTISRD | GNWHYF | WGQGT |
| HC_5 | GGGLVQ | N (SEQ ID | GKGLEW | TSYNPSL | TAKNSF | DF (SEQ | MVTVSS |
| | PGGSLRL | NO: 6000) | VG (SEQ | KS (SEQ | YLQMNS | ID NO: | (SEQ ID |
| | SCAVSG | | ID NO: | ID NO: | LRAEDT | 6002) | NO: 6034) |
| | FSIN | | 6032) | 6001) | AVYYCA | | |
| | (SEQ ID | | | | R (SEQ ID | | |
| | NO: 6030) | | | | NO: 6033) | | |
| 9G1- | QIQLVQS | TGGYHW | WVRQAP | YIYSSGS | RVTMTR | GNWHYF | WGQGT |
| HC_6 | GAEVKK | N (SEQ ID | GQGLEW | TSYNPSL | DTSTNTF | DF (SEQ | MVTVSS |
| | PGASVK | NO: 6000) | MG (SEQ | KS (SEQ | YMELSS | ID NO: | (SEQ ID |
| | VSCKVS | | ID NO: | ID NO: | LRSEDTA | 6002) | NO: 6038) |
| | GFSIN | | 6036) | 6001) | VYYCAR | | |
| | (SEQ ID | | | | (SEQ ID | | |
| | NO: 6035) | | | | NO: 6037) | | |
| 15H6- | QIQLQES | TGGYHW | WIRQHP | YIYSSGT | LVTISRD | GNWHYF | WGQGTL |
| HC_1 | GPGLVK | N (SEQ ID | GKGLEW | TRYNPSL | TSKNQFS | DY (SEQ | VTVSS |
| | PSQTLSL | NO: 6007) | IG (SEQ | KS (SEQ | LKLSSVT | ID NO: | (SEQ ID |
| | TCTVSGF | | ID NO: | ID NO: | AADTAV | 6009) | NO: 6042) |
| | SIN (SEQ | | 6040) | 6008) | YYCAR | | |
| | ID NO: | | | | (SEQ ID | | |
| | 6039) | | | | NO: 6041) | | |
| 15H6- | QIQLQES | TGGYHW | WIRQPA | YIYSSGT | RVTMSR | GNWHYF | WGQGTL |
| HC_2 | GPGLVK | N (SEQ ID | GKGLEW | TRYNPSL | DTSKNQ | DY (SEQ | VTVSS |
| | PSETLSL | NO: 6007) | IG (SEQ | KS (SEQ | FSLKLSS | ID NO: | (SEQ ID |
| | TCTVSGF | | ID NO: | ID NO: | VTAADT | 6009) | NO: 6046) |
| | SIN (SEQ | | 6044) | 6008) | AVYYCA | | |
| | ID NO: | | | | R (SEQ ID | | |
| | 6043) | | | | NO: 6045) | | |
| 15H6- | EIQLLES | TGGYHW | WVRQAP | YIYSSGT | RFTISRD | GNWHYF | WGQGTL |
| HC 3 | GGGLVQ | N (SEQ ID | GKGLEW | TRYNPSL | TSKNTF | DY (SEQ | VTVSS |
| | PGGSLRL | NO: 6007) | VG (SEQ | KS (SEQ | YLQMNS | ID NO: | (SEQ ID |
| | SCAVSG | | ID NO: | ID NO: | LRAEDT | 6009) | NO: 6050) |
| | FSIN | | 6048) | 6008) | AVYYCA | | |
| | (SEQ ID | | | | R (SEQ ID | | |
| | NO: 6047) | | | | NO: 6049) | | |
| 15H6- | QIQLVES | TGGYHW | WIRQAP | YIYSSGT | RFTISRD | GNWHYF | WGQGTL |
| HC_4 | GGGLVK | N (SEQ ID | GKGLEW | TRYNPSL | TAKNSF | DY (SEQ | VTVSS |
| | PGGSLRL | NO: 6007) | VG (SEQ | KS (SEQ | YLQMNS | ID NO: | (SEQ ID |
| | SCAVSG | | ID NO: | ID NO: | LRAEDT | 6009) | NO: 6054) |
| | FSIN | | 6052) | 6008) | AVYYCA | | |
| | (SEQ ID | | | | R (SEQ ID | | |
| | NO: 6051) | | | | NO: 6053) | | |
| 15H6- | QIQLVQS | TGGYHW | WVRQAP | YIYSSGT | RVTMTR | GNWHYF | WGQGTL |
| HC_5 | GAEVKK | N (SEQ ID | GQGLEW | TRYNPSL | DTSTNTF | DY (SEQ | VTVSS |
| | PGASVK | NO: 6007) | MG (SEQ | KS (SEQ | YMELSS | ID NO: | (SEQ ID |
| | VSCKVS | | ID NO: | ID NO: | LRSEDTA | 6009) | NO: 6058) |
| | GFSIN | | 6056) | 6008) | VYYCAR | | |
| | (SEQ ID | | | | (SEQ ID | | |
| | NO: 6055) | | | | NO: 6057) | | |
| 15H6- | EIQLVQS | TGGYHW | WVQQAP | YIYSSGT | RVTITRD | GNWHYF | WGQGTL |
| HC_6 | GAEVKK | N (SEQ ID | GKGLEW | TRYNPSL | TSTNTFY | DY (SEQ | VTVSS |
| | PGATVKI | NO: 6007) | MG (SEQ | KS (SEQ | MELSSL | ID NO: | (SEQ ID |
| | SCKVSG | | ID NO: | ID NO: | RSEDTA | 6009) | NO: 6062) |
| | FSIN | | 6060) | 6008) | VYYCAR | | |
| | (SEQ ID | | | | (SEQ ID | | |
| | NO: 6059) | | | | NO: 6061) | | |

TABLE 7B
Exemplary heavy chain CDRs and FWRs of NKp30-targeting antigen binding domains
(according to the Kabat numbering scheme)

| Ab ID | VHFWR1 | VHCDR1 | VHFWR2 | VHCDR2 | VHFWR3 | VHCDR3 | VHFWR4 |
|---|---|---|---|---|---|---|---|
| 9G1-HC | QIQLQES | GYHWN | WIRQFP | YIYSSGS | RISITRDT | GNWHYF | WGQGT |
| | GPGLVK | (SEQ ID | GKKLEW | TSYNPSL | SKNQFFL | DF (SEQ | MVTVSS |
| | PSQSLSL | NO: 7313) | MG (SEQ | KS (SEQ | QLNSVT | ID NO: | (SEQ ID |
| | TCSVTGF | | ID NO: | ID NO: | TEDTAT | 6002) | NO: 6006) |
| | SINTG | | 6004) | 6001) | YYCAR | | |
| | (SEQ ID | | | | (SEQ ID | | |
| | NO: 7317) | | | | NO: 6005) | | |
| 15H6- | QIQLQES | GYHWN | WIRQFP | YIYSSGT | RISITRDT | GNWHYF | WGQGTL |
| HC | GPGLVK | (SEQ ID | GKKLEW | TRYNPSL | SKNQFFL | DY (SEQ | VAVSS |
| | PSQSLSL | NO: 7313) | MG (SEQ | KS (SEQ | QLNSVT | ID NO: | (SEQ ID |
| | TCSVTGF | | ID NO: | ID NO: | PEDTAT | 6009) | NO: 6013) |
| | SINTG | | 6011) | 6008) | YYCTR | | |
| | (SEQ ID | | | | (SEQ ID | | |
| | NO: 7317) | | | | NO: 6012) | | |
| 9G1- | QIQLQES | GYHWN | WIRQPA | YIYSSGS | RVTMSR | GNWHYF | WGQGT |
| HC_1 | GPGLVK | (SEQ ID | GKGLEW | TSYNPSL | DTSKNQ | DF (SEQ | MVTVSS |
| | PSETLSL | NO: 7313) | IG (SEQ | KS (SEQ | FSLKLSS | ID NO: | (SEQ ID |
| | TCTVSGF | | ID NO: | ID NO: | VTAADT | 6002) | NO: 6017) |
| | SINTG | | 6015) | 6001) | AVYYCA | | |
| | (SEQ ID | | | | R (SEQ ID | | |
| | NO: 7371) | | | | NO: 6016) | | |
| 9G1- | QIQLQES | GYHWN | WIRQHP | YIYSSGS | LVTISRD | GNWHYF | WGQGT |
| HC_2 | GPGLVK | (SEQ ID | GKGLEW | TSYNPSL | TSKNQFS | DF (SEQ | MVTVSS |
| | PSQTLSL | NO: 7313) | IG (SEQ | KS (SEQ | LKLSSVT | ID NO: | (SEQ ID |
| | TCTVSGF | | ID NO: | ID NO: | AADTAV | 6002) | NO: 6021) |
| | SINTG | | 6019) | 6001) | YYCAR | | |
| | (SEQ ID | | | | (SEQ ID | | |
| | NO: 7372) | | | | NO: 6020) | | |
| 9G1- | EIQLLES | GYHWN | WVRQAP | YIYSSGS | RFTISRD | GNWHYF | WGQGT |
| HC_3 | GGGLVQ | (SEQ ID | GKGLEW | TSYNPSL | TSKNTF | DF (SEQ | MVTVSS |
| | PGGSLRL | NO: 7313) | VG (SEQ | KS (SEQ | YLQMNS | ID NO: | (SEQ ID |
| | SCAVSG | | ID NO: | ID NO: | LRAEDT | 6002) | NO: 6025) |
| | FSINTG | | 6023) | 6001) | AVYYCA | | |
| | (SEQ ID | | | | R (SEQ ID | | |
| | NO: 7373) | | | | NO: 6024) | | |
| 9G1- | QIQLVQS | GYHWN | WVRQAP | YIYSSGS | RVTITRD | GNWHYF | WGQGT |
| HC_4 | GAEVKK | (SEQ ID | GQGLEW | TSYNPSL | TSTNTFY | DF (SEQ | MVTVSS |
| | PGSSVK | NO: 7313) | MG (SEQ | KS (SEQ | MELSSL | ID NO: | (SEQ ID |
| | VSCKVS | | ID NO: | ID NO: | RSEDTA | 6002) | NO: 6029) |
| | GFSINTG | | 6027) | 6001) | VYYCAR | | |
| | (SEQ ID | | | | (SEQ ID | | |
| | NO: 7374) | | | | NO: 6028) | | |
| 9G1- | EIQLVES | GYHWN | WVRQAP | YIYSSGS | RFTISRD | GNWHYF | WGQGT |
| HC_5 | GGGLVQ | (SEQ ID | GKGLEW | TSYNPSL | TAKNSF | DF (SEQ | MVTVSS |
| | PGGSLRL | NO: 7313) | VG (SEQ | KS (SEQ | YLQMNS | ID NO: | (SEQ ID |
| | SCAVSG | | ID NOL | ID NO: | LRAEDT | 6002) | NO: 6034) |
| | FSINTG | | 6032) | 6001) | AVYYCA | | |
| | (SEQ ID | | | | R (SEQ ID | | |
| | NO: 7375) | | | | NO: 6033) | | |
| 9G1- | QIQLVQS | GYHWN | WVRQAP | YIYSSGS | RVTMTR | GNWHYF | WGQGT |
| HC_6 | GAEVKK | (SEQ ID | GQGLEW | TSYNPSL | DTSTNTF | DF (SEQ | MVTVSS |
| | PGASVK | NO: 7313) | MG (SEQ | KS (SEQ | YMELSS | ID NO: | (SEQ ID |
| | VSCKVS | | ID NO: | ID NO: | LRSEDTA | 6002) | NO: 6038) |
| | GFSINTG | | 6036) | 6001) | VYYCAR | | |
| | (SEQ ID | | | | (SEQ ID | | |
| | NO: 7376) | | | | NO: 6037) | | |
| 15H6- | QIQLQES | GYHWN | WIRQHP | YIYSSGT | LVTISRD | GNWHYF | WGQGTL |
| HC_1 | GPGLVK | (SEQ ID | GKGLEW | TRYNPSL | TSKNQFS | DY (SEQ | VTVSS |
| | PSQTLSL | NO: 7313) | IG (SEQ | KS (SEQ | LKLSSVT | ID NO: | (SEQ ID |
| | TCTVSGF | | ID NO: | ID NO: | AADTAV | 6009) | NO: 6042) |
| | SINTG | | 6040) | 6008) | YYCAR | | |
| | (SEQ ID | | | | (SEQ ID | | |
| | NO: 7372) | | | | NO: 6041) | | |
| 15H6- | QIQLQES | GYHWN | WIRQPA | YIYSSGT | RVTMSR | GNWHYF | WGQGTL |
| HC_2 | GPGLVK | (SEQ ID | GKGLEW | TRYNPSL | DTSKNQ | DY (SEQ | VTVSS |
| | PSETLSL | NO: 7313) | IG (SEQ | KS (SEQ | FSLKLSS | ID NO: | (SEQ ID |
| | TCTVSGF | | ID NO: | ID NO: | VTAADT | 6009) | NO: 6046) |
| | SINTG | | 6044) | 6008) | AVYYCA | | |
| | (SEQ ID | | | | R (SEQ ID | | |
| | NO: 7371) | | | | NO: 6045) | | |
| 15H6- | EIQLLES | GYHWN | WVRQAP | YIYSSGT | RFTISRD | GNWHYF | WGQGTL |
| HC_3 | GGGLVQ | (SEQ ID | GKGLEW | TRYNPSL | TSKNTF | DY (SEQ | VTVSS |
| | PGGSLRL | NO: 7313) | VG (SEQ | KS (SEQ | YLQMNS | ID NO: | (SEQ ID |
| | SCAVSG | | ID NO: | ID NO: | LRAEDT | 6009) | NO: 6050) |
| | FSINTG | | 6048) | 6008) | AVYYCA | | |
| | (SEQ ID | | | | R (SEQ ID | | |
| | NO: 7373) | | | | NO: 6049) | | |
| 15H6- | QIQLVES | GYHWN | WIRQAP | YIYSSGT | RFTISRD | GNWHYF | WGQGTL |
| HC_4 | GGGLVK | (SEQ ID | GKGLEW | TRYNPSL | TAKNSF | DY (SEQ | VTVSS |
| | PGGSLRL | NO: 7313) | VG (SEQ | KS (SEQ | YLQMNS | ID NO: | (SEQ ID |
| | SCAVSG | | ID NO: | ID NO: | LRAEDT | 6009) | NO: 6054) |
| | FSINTG | | 6052) | 6008) | AVYYCA | | |
| | (SEQ ID | | | | R (SEQ ID | | |
| | NO: 7377) | | | | NO: 6053) | | |
| 15H6- | QIQLVQS | GYHWN | WVRQAP | YIYSSGT | RVTMTR | GNWHYF | WGQGTL |
| HC_5 | GAEVKK | (SEQ ID | GQGLEW | TRYNPSL | DTSTNTF | DY (SEQ | VTVSS |
| | PGASVK | NO: 7313) | MG (SEQ | KS (SEQ | YMELSS | ID NO: | (SEQ ID |
| | VSCKVS | | ID NO: | ID NO: | LRSEDTA | 6009) | NO: 6058) |
| | GFSINTG | | 6056) | 6008) | VYYCAR | | |
| | (SEQ ID | | | | (SEQ ID | | |
| | NO: 7376) | | | | NO: 6057) | | |
| 15H6- | EIQLVQS | GYHWN | WVQQAP | YIYSSGT | RVTITRD | GNWHYF | WGQGTL |
| HC_6 | GAEVKK | (SEQ ID | GKGLEW | TRYNPSL | TSTNTFY | DY (SEQ | VTVSS |
| | PGATVKI | NO: 7313) | MG (SEQ | KS (SEQ | MELSSL | ID NO: | (SEQ ID |
| | SCKVSG | | ID NO: | ID NO: | RSEDTA | 6009) | NO: 6062) |
| | FSINTG | | 6060) | 6008) | VYYCAR | | |
| | (SEQ ID | | | | (SEQ ID | | |
| | NO: 7378) | | | | NO: 6061) | | |
| 9D9-HC | QIQLQES | GYHWN | WIRQFP | YIYSSGT | RISITRDT | GDWHYF | WGQGT |
| | GPGLVK | (SEQ ID | GKKVEW | TKYNPS | SKNQFFL | DY (SEQ | MVAVSS |
| | PSQSLSL | NO: 7313) | MG (SEQ | LKS (SEQ | QLNSVT | ID NO: | (SEQ ID |
| | SCSVTGF | | ID NO: | ID NO: | TEDTAT | 7315) | NO: 7316) |
| | SINTG | | 7314) | 7385) | YYCAR | | |
| | (SEQ ID | | | | (SEQ ID | | |
| | NO: 7312) | | | | NO: 6005) | | |
| 3A12- | QIQLQES | GYHWN | WIRQFP | YIYSSGS | RFSITRD | GNWHYF | WGQGTL |
| HC | GPGLVK | (SEQ ID | GKKLEW | TRYNPSL | TSKNQFF | DY (SEQ | VAVSS |
| | PSQSLSL | NO: 7313) | MG (SEQ | KS (SEQ | LQLNSV | ID NO: | (SEQ ID |
| | TCSVTGF | | ID NO: | ID NO: | TTEDTAT | 6009) | NO: 6013) |
| | SINTG | | 6004) | 7318) | YYCTR | | |
| | (SEQ ID | | | | (SEQ ID | | |
| | NO: 7317) | | | | NO: 7319) | | |
| 12D10- | QIQLQES | GYHWN | WIRQFP | YIYSSGT | RISITRDT | GNWHYF | WGQGTL |
| HC | GPGLVK | (SEQ ID | GKKLEW | TRYNPSL | SKNQFFL | DY (SEQ | VAVSS |
| | PSQSLSL | NO: 7313) | MG (SEQ | KS (SEQ | QLNSVT | ID NO: | (SEQ ID |
| | TCSVTGF | | ID NO: | ID NO: | PEDTAT | 6009) | NO: 6013) |
| | SINTG | | 6004) | 6008) | YYCTR | | |
| | (SEQ ID | | | | (SEQ ID | | |
| | NO: 7317) | | | | NO: 6012) | | |
| 15E1- | QIQLQES | GYHWN | WIRQFP | YIYSSGS | RFSITRD | GDWHYF | WGPGTM |
| HC | GPGLVK | (SEQ ID | GKKLEW | TSYNPSL | TSKNQFF | DY (SEQ | VTVSS |
| | PSQSLSL | NO: 7313) | MG (SEQ | KS (SEQ | LQLNSV | ID NO: | (SEQ ID |
| | SCSVTGF | | ID NO: | ID NO: | TTEDTAT | 7315) | NO: 7324) |
| | SITTT | | 6004) | 6001) | YYCAR | | |
| | (SEQ ID | | | | (SEQ ID | | |
| | NO: 7322) | | | | NO: 7323) | | |
| 15E1_ | QIQLQES | GYHWN | WIRQHP | YIYSSGS | LVTISRD | GDWHYF | WGQGT |
| Humanized | GPGLVK | (SEQ ID | GKGLEW | TSYNPSL | TSKNQFS | DY (SEQ | MVTVSS |
| variant_ | PSQTLSL | NO: 7313) | IG (SEQ | KS (SEQ | LKLSSVT | ID NO: | (SEQ ID |
| VH1 | TCTVSGF | | ID NO: | ID NO: | AADTAV | 7315) | NO: 6006) |
| | SITTT | | 6019) | 6001) | YYCAR | | |
| | (SEQ ID | | | | (SEQ ID | | |
| | NO: 7330) | | | | NO: 6020) | | |
| 15E1_ | QIQLVES | GYHWN | WIRQAP | YIYSSGS | RFTISRD | GDWHYF | WGQGT |
| Humanized | GGGLVK | (SEQ ID | GKGLEW | TSYNPSL | TAKNSF | DY (SEQ | MVTVSS |
| variant_ | PGGSLRL | NO: 7313) | VG (SEQ | KS (SEQ | YLQMNS | ID NO: | (SEQ ID |
| VH2 | SCAVSG | | ID NO: | ID NO: | LRAEDT | 7315) | NO: 6006) |
| | FSITTT | | 6052) | 6001) | AVYYCA | | |
| | (SEQ ID | | | | R (SEQ ID | | |
| | NO: 7331) | | | | NO: 6033) | | |
| 15E1_ | EIQLLES | GYHWN | WVRQAP | YIYSSGS | RFTISRD | GDWHYF | WGQGT |
| Humanized | GGGLVQ | (SEQ ID | GKGLEW | TSYNPSL | TSKNTF | DY (SEQ | MVTVSS |
| variant_ | PGGSLRL | NO: 7313) | VG (SEQ | KS (SEQ | YLQMNS | ID NO: | (SEQ ID |
| VH3 | SCAVSG | | ID NO: | ID NO: | LRAEDT | 7315) | NO: 6006) |
| | FSITTT | | 6023) | 6001) | AVYYCA | | |
| | (SEQ ID | | | | R (SEQ ID | | |
| | NO: 7332) | | | | NO: 6024) | | |
| 15E1_ | EIQLVES | GYHWN | WVRQAP | YIYSSGS | RFTISRD | GDWHYF | WGQGT |
| Humanized | GGGLVQ | (SEQ ID | GKGLEW | TSYNPSL | TAKNSF | DY (SEQ | MVTVSS |
| variant_ | PGGSLRL | NO: 7313) | VG (SEQ | KS (SEQ | YLQMNS | ID NO: | (SEQ ID |
| VH4 | SCAVSG | | ID NO: | ID NO: | LRAEDT | 7315) | NO: 6006) |
| | FSITTT | | 6023) | 6001) | AVYYCA | | |
| | (SEQ ID | | | | R (SEQ ID | | |
| | NO: 7333) | | | | NO: 6033) | | |
| 15E1_ | QIQLVQS | GYHWN | WVRQAP | YIYSSGS | RVTMTR | GDWHYF | WGQGT |
| Humanized | GAEVKK | (SEQ ID | GQGLEW | TSYNPSL | DTSTNTF | DY (SEQ | MVTVSS |
| variant_ | PGASVK | NO: 7313) | MG (SEQ | KS (SEQ | YMELSS | ID NO: | (SEQ ID |
| VH5 | VSCKVS | | ID NO: | ID NO: | LRSEDTA | 7315) | NO: 6006) |
| | GFSITTT | | 6027) | 6001) | VYYCAR | | |
| | (SEQ ID | | | | (SEQ ID | | |
| | NO: 7334) | | | | NO: 6037) | | |

TABLE 8A
Exemplary light chain CDRs and FWRs of NKp30-targeting antigen binding domains

| Ab ID | VLFWR1 | VLCDR1 | VLFWR2 | VLCDR2 | VLFWR3 | VLCDR3 | VLFWR4 |
|---|---|---|---|---|---|---|---|
| 9G1-LC | SYTLTQP | SGERLSD | WYQQKP | ENDKRP | GIPDQFS | QSWDST | FGSGTQ |
| | PLLSVAL | KYVH | GRAPVM | S (SEQ ID | GSNSGNI | NSAV | LTVL |
| | GHKATIT | (SEQ ID | VIY (SEQ | NO: 6064) | ATLTISK | (SEQ ID | (SEQ ID |
| | C (SEQ ID | NO: 6063) | ID NO: | | AQAGYE | NO: 7293) | NO: 6069) |
| | NO: 6066) | | 6067) | | ADYYC | | |
| | | | | | (SEQ ID | | |
| | | | | | NO: 7292) | | |
| 15H6- | SYTLTQP | SGENLS | WYQQKP | ENEKRPS | GIPDQFS | HYWESI | FGSGTH |
| LC | PSLSVAP | DKYVH | GRAPVM | (SEQ ID | GSNSGNI | NSVV | LTVL |
| | GQKATII | (SEQ ID | VIY (SEQ | NO: 6071) | ATLTISK | (SEQ ID | (SEQ ID |
| | C (SEQ ID | NO: 6070) | ID NO: | | AQPGSE | NO: 6072) | NO: 6076) |
| | NO: 6073) | | 6074) | | ADYYC | | |
| | | | | | (SEQ ID | | |
| | | | | | NO: 6075) | | |
| 9G1- | QSVTTQ | SGERLSD | WYQQLP | ENDKRP | GVPDRF | QSWDST | FGGGTQ |
| LC_1 | PPSVSGA | KYVH | GTAPKM | S (SEQ ID | SGSNSG | NSAV | LTVL |
| | PGQRVTI | (SEQ ID | LIY (SEQ | NO: 6064) | NSASLAI | (SEQ ID | (SEQ ID |
| | SC (SEQ | NO: 6063) | ID NO: | | TGLQAE | NO: 7293) | NO: 6080) |
| | ID NO: | | 6078) | | DEADYY | | |
| | 6077) | | | | C (SEQ ID | | |
| | | | | | NO: 6079) | | |
| 9G1- | QSVTTQ | SGERLSD | WYQQLP | ENDKRP | GVPDRF | QSWDST | FGGGTQ |
| LC_2 | PPSASGT | KYVH | GTAPKM | S (SEQ ID | SGSNSG | NSAV | LTVL |
| | PGQRVTI | (SEQ ID | LIY (SEQ | NO: 6064) | NSASLAI | (SEQ ID | (SEQ ID |
| | SC (SEQ | NO: 6063) | ID NO: | | SGLQSE | NO: 7293) | NO: 6084) |
| | ID NO: | | 6082) | | DEADYY | | |
| | 6081) | | | | C (SEQ ID | | |
| | | | | | NO: 6083) | | |
| 9G1- | QSVTTQ | SGERLSD | WYQQLP | ENDKRP | GVPDRF | QSWDST | FGGGTQ |
| LC_3 | PPSASGT | KYVH | GTAPKM | S (SEQ ID | SGSNSG | NSAV | LTVL |
| | PGQRVTI | (SEQ ID | LIY (SEQ | NO: 6064) | NSASLAI | (SEQ ID | (SEQ ID |
| | SC (SEQ | NO: 6063) | ID NO: | | SGLRSED | NO: 7293) | NO: 6088) |
| | ID NO: | | 6086) | | EADYYC | | |
| | 6085) | | | | (SEQ ID | | |
| | | | | | NO: 6087) | | |
| 9G1- | SSETTQP | SGERLSD | WYQQKP | ENDKRP | GIPERFS | QSWDST | FGGGTQ |
| LC_4 | HSVSVA | KYVH | GQDPVM | S (SEQ ID | GSNPGN | NSAV | LTVL |
| | TAQMAR | (SEQ ID | VIY (SEQ | NO: 6064) | TATLTIS | (SEQ ID | (SEQ ID |
| | ITC (SEQ | NO: 6063) | ID NO: | | RIEAGDE | NO: 7293) | NO: 6092) |
| | ID NO: | | 6090) | | ADYYC | | |
| | 6089) | | | | (SEQ ID | | |
| | | | | | NO: 6091) | | |
| 9G1- | DIQMTQ | SGERLSD | WYQQKP | ENDKRP | GVPSRFS | QSWDST | FGQGTK |
| LC_5 | SPSTLSA | KYVH | GKAPKM | S (SEQ ID | GSNSGN | NSAV | VEIK |
| | SVGDRV | (SEQ ID | LIY (SEQ | NO: 6064) | EATLTIS | (SEQ ID | (SEQ ID |
| | TITC | NO: 6063) | ID NO: | | SLQPDDF | NO: 7293) | NO: 6096) |
| | (SEQ ID | | 6094) | | ATYYC | | |
| | NO: 6093) | | | | (SEQ ID | | |
| | | | | | NO: 6095) | | |
| 15H6- | QYVLTQ | SGENLS | WYQQLP | ENEKRPS | GVPDRF | HYWESI | FGEGTEL |
| LC_1 | PPSASGT | DKYVH | GTAPKM | (SEQ ID | SGSNSG | NSVV | TVL (SEQ |
| | PGQRVTI | (SEQ ID | LIY (SEQ | NO: 6071) | NSASLAI | (SEQ ID | ID NO: |
| | SC (SEQ | NO: 6070) | ID NO: | | SGLQSE | NO: 6072) | 6100) |
| | ID NO: | | 6098) | | DEADYY | | |
| | 6097) | | | | C (SEQ ID | | |
| | | | | | NO: 6099) | | |
| 15H6- | QYVLTQ | SGENLS | WYQQLP | ENEKRPS | GVPDRF | HYWESI | FGEGTEL |
| LC_2 | PPSASGT | DKYVH | GTAPKM | (SEQ ID | SGSNSG | NSVV | TVL (SEQ |
| | PGQRVTI | (SEQ ID | LIY (SEQ | NO: 6071) | NSASLAI | (SEQ ID | ID NO: |
| | SC (SEQ | NO: 6070) | ID NO: | | SGLRSED | NO: 6072) | 6104) |
| | ID NO: | | 6102) | | EADYYC | | |
| | 6101) | | | | (SEQ ID | | |
| | | | | | NO: 6103) | | |
| 15H6- | SYELTQP | SGENLS | WYQQKP | ENEKRPS | GIPERFS | HYWESI | FGEGTEL |
| LC_3 | PSVSVSP | DKYVH | GQSPVM | (SEQ ID | GSNSGN | NSVV | TVL (SEQ |
| | GQTASIT | (SEQ ID | VIY (SEQ | NO: 6071) | TATLTIS | (SEQ ID | ID NO: |
| | C (SEQ ID | NO: 6070) | ID NO: | | GTQAMD | NO: 6072) | 6108) |
| | NO: 6105) | | 6106) | | EADYYC | | |
| | | | | | (SEQ ID | | |
| | | | | | NO: 6107) | | |
| 15H6- | DYVLTQ | SGENLS | WYLQKP | ENEKRPS | GVPDRF | HYWESI | FGQGTK |
| LC_4 | SPLSLPV | DKYVH | GQSPQM | (SEQ ID | SGSNSG | NSVV | VEIK |
| | TPGEPAS | (SEQ ID | LIY (SEQ | NO: 6071) | NDATLKI | (SEQ ID | (SEQ ID |
| | ISC (SEQ | NO: 6070) | ID NO: | | SRVEAE | NO: 6072) | NO: 6112) |
| | ID NO: | | 6110) | | DVGVYY | | |
| | 6109) | | | | C (SEQ ID | | |
| | | | | | NO: 6111) | | |
| 15H6- | AYQLTQ | SGENLS | WYQQKP | ENEKRPS | GVPSRFS | HYWESI | FGQGTK |
| LC_5 | SPSSLSA | DKYVH | GKAPKM | (SEQ ID | GSNSGN | NSVV | VEIK |
| | SVGDRV | (SEQ ID | LIY (SEQ | NO: 6071) | DATLTIS | (SEQ ID | (SEQ ID |
| | TITC | NO: 6070) | ID NO: | | SLQPEDF | NO: 6072) | NO: 6116) |
| | (SEQ ID | | 6114) | | ATYYC | | |
| | NO: 6113) | | | | (SEQ ID | | |
| | | | | | NO: 6115) | | |
| 15H6- | EYVLTQ | SGENLS | WYQQKP | ENEKRPS | GIPARFS | HYWESI | FGQGTK |
| LC_6 | SPATLSV | DKYVH | GQAPRM | (SEQ ID | GSNSGN | NSVV | VEIK |
| | SPGERAT | (SEQ ID | LIY (SEQ | NO: 6071) | EATLTIS | (SEQ ID | (SEQ ID |
| | LSC (SEQ | NO: 6070) | ID NO: | | SLQSEDF | NO: 6072) | NO: 6120) |
| | ID NO: | | 6118) | | AVYYC | | |
| | 6117) | | | | (SEQ ID | | |
| | | | | | NO: 6119) | | |
| 9D9-LC | SYTLTQP | SGENLS | WYQQKP | ENDKRP | GIPDQFS | HCWDST | FGSGTH |
| | PLVSVA | DKYVH | GRAPVM | S (SEQ ID | GSNSGNI | NSAV | LTVL |
| | LGQKATI | (SEQ ID | VIY (SEQ | NO: 6064) | ATLTISK | (SEQ ID | (SEQ ID |
| | IC (SEQ | NO: 6070) | ID NO: | | AQAGYE | NO: 7321) | NO: 6076) |
| | ID NO: | | 6067) | | ADYYC | | |
| | 7320) | | | | (SEQ ID | | |
| | | | | | NO: 7292) | | |
| 3A12- | SYTLTQP | SGENLS | WYQQKP | ENDKRP | GIPDQFS | HCWDST | FGSGTH |
| LC | PLVSVA | DKYVH | GRAPVM | S (SEQ ID | GSNSGNI | NSAV | LTVL |
| | LGQKATI | (SEQ ID | VIY (SEQ | NO: 6064) | ATLTISK | (SEQ ID | (SEQ ID |
| | IC (SEQ | NO: 6070) | ID NO: | | AQAGYE | NO: 7321) | NO: 6076) |
| | ID NO: | | 6067) | | ADYYC | | |
| | 7320) | | | | (SEQ ID | | |
| | | | | | NO: 7292) | | |
| 12D10- | SYTLTQP | SGENLS | WYQQKP | ENEKRPS | GIPDQFS | HYWESI | FGSGTH |
| LC | PSLSVAP | DKYVH | GRAPVM | (SEQ ID | GSNSGNI | NSVV | LTVL |
| | GQKATII | (SEQ ID | VIY (SEQ | NO: 6071) | ATLTISK | (SEQ ID | (SEQ ID |
| | C (SEQ ID | NO: 6070) | ID NO: | | AQPGSE | NO: 6072) | NO: 6076) |
| | NO: 6073) | | 6074) | | ADYYC | | |
| | | | | | (SEQ ID | | |
| | | | | | NO: 6075) | | |
| 15E1- | SFTLTQP | SGEKLS | WYQQKP | ENDRRP | GIPDQFS | QFWDST | FGGGTQ |
| LC | PLVSVA | DKYVH | GRAPVM | S (SEQ ID | GSNSGNI | NSAV | LTVL |
| | VGQVAT | (SEQ ID | VIY (SEQ | NO: 7327) | ASLTISK | (SEQ ID | (SEQ ID |
| | ITC (SEQ | NO: 7326) | ID NO: | | AQAGDE | NO: 7329) | NO: 6080) |
| | ID NO: | | 6067) | | ADYFC | | |
| | 7325) | | | | (SEQ ID | | |
| | | | | | NO: 7328) | | |
| 15E1_ | SSETTQP | SGEKLS | WYQQKP | ENDRRP | GIPERFS | QFWDST | FGGGTQ |
| Humanized | PSVSVSP | DKYVH | GQSPVM | S (SEQ ID | GSNSGN | NSAV | LTVL |
| variant_ | GQTASIT | (SEQ ID | VIY (SEQ | NO: 7327) | TATLTIS | (SEQ ID | (SEQ ID |
| VL1 | C (SEQ ID | NO: 7326) | ID NO: | | GTQAMD | NO: 7329) | NO: 6080) |
| | NO: 7335) | | 6106) | | EADYFC | | |
| | | | | | (SEQ ID | | |
| | | | | | NO: 7336) | | |
| 15E1_ | SSETTQP | SGEKLS | WYQQKP | ENDRRP | GIPERFS | QFWDST | FGGGTQ |
| Humanized | HSVSVA | DKYVH | GQDPVM | S (SEQ ID | GSNPGN | NSAV | LTVL |
| variant_ | TAQMAR | (SEQ ID | VIY (SEQ | NO: 7327) | TATLTIS | (SEQ ID | (SEQ ID |
| VL2 | ITC (SEQ | NO: 7326) | ID NO: | | RIEAGDE | NO: 7329) | NO: 6080) |
| | ID NO: | | 6090) | | ADYFC | | |
| | 6089) | | | | (SEQ ID | | |
| | | | | | NO: 7337) | | |
| 15E1_ | QSVTTQ | SGEKLS | WYQQLP | ENDRRP | GVPDRF | QFWDST | FGGGTQ |
| Humanized | PPSASGT | DKYVH | GTAPKM | S (SEQ ID | SGSNSG | NSAV | LTVL |
| variant_ | PGQRVTI | (SEQ ID | LIY (SEQ | NO: 7327) | NSASLAI | (SEQ ID | (SEQ ID |
| VL3 | SC (SEQ | NO: 7326) | ID NO: | | SGLRSED | NO: 7329) | NO: 6080) |
| | ID NO: | | 6078) | | EADYFC | | |
| | 6081) | | | | (SEQ ID | | |
| | | | | | NO: 7338) | | |
| 15E1_ | QSVTTQ | SGEKLS | WYQQLP | ENDRRP | GVPDRF | QFWDST | FGGGTQ |
| Humanized | PPSVSGA | DKYVH | GTAPKM | S (SEQ ID | SGSNSG | NSAV | LTVL |
| variant_ | PGQRVTI | (SEQ ID | LIY (SEQ | NO: 7327) | NSASLAI | (SEQ ID | (SEQ ID |
| VL4 | SC (SEQ | NO: 7326) | ID NO: | | TGLQAE | NO: 7329) | NO: 6080) |
| | ID NO: | | 6078) | | DEADYF | | |
| | 6077) | | | | C (SEQ ID | | |
| | | | | | NO: 7339) | | |
| 15E1_ | DSVTTQ | SGEKLS | WYQQRP | ENDRRP | GVPDRF | QFWDST | FGGGTK |
| Humanized | SPLSLPV | DKYVH | GQSPRM | S (SEQ ID | SGSNSG | NSAV | VEIK |
| variant_ | TLGQPA | (SEQ ID | LIY (SEQ | NO: 7327) | NDATLKI | (SEQ ID | (SEQ ID |
| VL5 | SISC | NO: 7326) | ID NO: | | SRVEAE | NO: 7329) | NO: 7514) |
| | (SEQ ID | | 7341) | | DVGVYF | | |
| | NO: 7340) | | | | C (SEQ ID | | |
| | | | | | NO: 7342) | | |

TABLE 9A
Exemplary variable regions of NKp30-targeting antigen binding domains

| SEQ ID | | | |
|---|---|---|---|
| NO | Ab ID | Description | Sequence |
| SEQ ID | 9G1-HC | 9G1 heavy chain | QIQLQESGPGLVKPSQSLSLTCSVTGFSINTGGYHWN |
| NO: 6121 | | variable region | WIRQFPGKKLEWMGYIYSSGSTSYNPSLKSRISITRDT |
| | | | SKNQFFLQLNSVTTEDTATYYCARGNWHYFDFWGQ |
| | | | GTMVTVSS |
| SEQ ID | 15H6-HC | 15H6 heavy | QIQLQESGPGLVKPSQSLSLTCSVTGFSINTGGYHWN |
| NO: 6122 | | chain variable | WIRQFPGKKLEWMGYIYSSGTTRYNPSLKSRISITRDT |
| | | region | SKNQFFLQLNSVTPEDTATYYCTRGNWHYFDYWGQ |
| | | | GTLVAVSS |
| SEQ ID | 9G1- | 9G1 heavy chain | QIQLQESGPGLVKPSETLSLTCTVSGFSINTGGYHWN |
| NO: 6123 | HC_1 | variable region | WIRQPAGKGLEWIGYIYSSGSTSYNPSLKSRVTMSRD |
| | | humanized | TSKNQFSLKLSSVTAADTAVYYCARGNWHYFDFWG |
| | | variant 1 | QGTMVTVSS |
| SEQ ID | 9G1- | 9G1 heavy chain | QIQLQESGPGLVKPSQTLSLTCTVSGFSINTGGYHWN |
| NO: 6124 | HC_2 | variable region | WIRQHPGKGLEWIGYIYSSGSTSYNPSLKSLVTISRDT |
| | | humanized | SKNQFSLKLSSVTAADTAVYYCARGNWHYFDFWGQ |
| | | variant 2 | GTMVTVSS |
| SEQ ID | 9G1- | 9G1 heavy chain | EIQLLESGGGLVQPGGSLRLSCAVSGFSINTGGYHWN |
| NO: 6125 | HC_3 | variable region | WVRQAPGKGLEWVGYIYSSGSTSYNPSLKSRFTISRD |
| | | humanized | TSKNTFYLQMNSLRAEDTAVYYCARGNWHYFDFWG |
| | | variant 3 | QGTMVTVSS |
| SEQ ID | 9G1- | 9G1 heavy chain | QIQLVQSGAEVKKPGSSVKVSCKVSGFSINTGGYHW |
| NO: 6126 | HC_4 | variable region | NWVRQAPGQGLEWMGYIYSSGSTSYNPSLKSRVTIT |
| | | humanized | RDTSTNTFYMELSSLRSEDTAVYYCARGNWHYFDFW |
| | | variant 4 | GQGTMVTVSS |
| SEQ ID | 9G1- | 9G1 heavy chain | EIQLVESGGGLVQPGGSLRLSCAVSGFSINTGGYHWN |
| NO: 6127 | HC_5 | variable region | WVRQAPGKGLEWVGYIYSSGSTSYNPSLKSRFTISRD |
| | | humanized | TAKNSFYLQMNSLRAEDTAVYYCARGNWHYFDFWG |
| | | variant 5 | QGTMVTVSS |
| SEQ ID | 9G1- | 9G1 heavy chain | QIQLVQSGAEVKKPGASVKVSCKVSGFSINTGGYHW |
| NO: 6128 | HC_6 | variable region | NWVRQAPGQGLEWMGYIYSSGSTSYNPSLKSRVTMT |
| | | humanized | RDTSTNTFYMELSSLRSEDTAVYYCARGNWHYFDFW |
| | | variant 6 | GQGTMVTVSS |
| SEQ ID | 15H6- | 15H6 heavy | QIQLQESGPGLVKPSQTLSLTCTVSGFSINTGGYHWN |
| NO: 6129 | HC_1 | chain variable | WIRQHPGKGLEWIGYIYSSGTTRYNPSLKSLVTISRDT |
| | | region | SKNQFSLKLSSVTAADTAVYYCARGNWHYFDYWGQ |
| | | humanized | GTLVTVSS |
| | | variant 1 | |
| SEQ ID | 15H6- | 15H6 heavy | QIQLQESGPGLVKPSETLSLTCTVSGFSINTGGYHWN |
| NO: 6130 | HC_2 | chain variable | WIRQPAGKGLEWIGYIYSSGTTRYNPSLKSRVTMSRD |
| | | region | TSKNQFSLKLSSVTAADTAVYYCARGNWHYFDYWG |
| | | humanized | QGTLVTVSS |
| | | variant 2 | |
| SEQ ID | 15H6- | 15H6 heavy | EIQLLESGGGLVQPGGSLRLSCAVSGFSINTGGYHWN |
| NO: 6131 | HC_3 | chain variable | WVRQAPGKGLEWVGYIYSSGTTRYNPSLKSRFTISRD |
| | | region | TSKNTFYLQMNSLRAEDTAVYYCARGNWHYFDYW |
| | | humanized | GQGTLVTVSS |
| | | variant 3 | |
| SEQ ID | 15H6- | 15H6 heavy | QIQLVESGGGLVKPGGSLRLSCAVSGFSINTGGYHWN |
| NO: 6132 | HC_4 | chain variable | WIRQAPGKGLEWVGYIYSSGTTRYNPSLKSRFTISRD |
| | | region | TAKNSFYLQMNSLRAEDTAVYYCARGNWHYFDYW |
| | | humanized | GQGTLVTVSS |
| | | variant 4 | |
| SEQ ID | 15H6- | 15H6 heavy | QIQLVQSGAEVKKPGASVKVSCKVSGFSINTGGYHW |
| NO: 6133 | HC_5 | chain variable | NWVRQAPGQGLEWMGYIYSSGTTRYNPSLKSRVTM |
| | | region | TRDTSTNTFYMELSSLRSEDTAVYYCARGNWHYFDY |
| | | humanized | WGQGTLVTVSS |
| | | variant 5 | |
| SEQ ID | 15H6- | 15H6 heavy | EIQLVQSGAEVKKPGATVKISCKVSGFSINTGGYHWN |
| NO: 6134 | HC_6 | chain variable | WVQQAPGKGLEWMGYIYSSGTTRYNPSLKSRVTITR |
| | | region | DTSTNTFYMELSSLRSEDTAVYYCARGNWHYFDYW |
| | | humanized | GQGTLVTVSS |
| | | variant 6 | |
| SEQ ID | 9G1-LC | 9G1 light chain | SYTLTQPPLLSVALGHKATITCSGERLSDKYVHWYQQ |
| NO: 7294 | | variable region | KPGRAPVMVIYENDKRPSGIPDQFSGSNSGNIATLTIS |
| | | | KAQAGYEADYYCQSWDSTNSAVFGSGTQLTVL |
| SEQ ID | 15H6-LC | 15H6 light chain | SYTLTQPPSLSVAPGQKATIICSGENLSDKYVHWYQQ |
| NO: 6136 | | variable region | KPGRAPVMVIYENEKRPSGIPDQFSGSNSGNIATLTIS |
| | | | KAQPGSEADYYCHYWESINSVVFGSGTHLTVL |
| SEQ ID | 9G1- | 9G1 light chain | QSVTTQPPSVSGAPGQRVTISCSGERLSDKYVHWYQQ |
| NO: 6137 | LC_1 | variable region | LPGTAPKMLIYENDKRPSGVPDRFSGSNSGNSASLAIT |
| | | humanized | GLQAEDEADYYCQSWDSTNSAVFGGGTQLTVL |
| | | variant 1 | |
| SEQ ID | 9G1- | 9G1 light chain | QSVTTQPPSASGTPGQRVTISCSGERLSDKYVHWYQQ |
| NO: 6138 | LC_2 | variable region | LPGTAPKMLIYENDKRPSGVPDRFSGSNSGNSASLAIS |
| | | humanized | GLQSEDEADYYCQSWDSTNSAVFGGGTQLTVL |
| | | variant 2 | |
| SEQ ID | 9G1- | 9G1 light chain | QSVTTQPPSASGTPGQRVTISCSGERLSDKYVHWYQQ |
| NO: 6139 | LC_3 | variable region | LPGTAPKMLIYENDKRPSGVPDRFSGSNSGNSASLAIS |
| | | humanized | GLRSEDEADYYCQSWDSTNSAVFGGGTQLTVL |
| | | variant 3 | |
| SEQ ID | 9G1- | 9G1 light chain | SSETTQPHSVSVATAQMARITCSGERLSDKYVHWYQ |
| NO: 6140 | LC_4 | variable region | QKPGQDPVMVIYENDKRPSGIPERFSGSNPGNTATLTI |
| | | humanized | SRIEAGDEADYYCQSWDSTNSAVFGGGTQLTVL |
| | | variant 4 | |
| SEQ ID | 9G1- | 9G1 light chain | DIQMTQSPSTLSASVGDRVTITCSGERLSDKYVHWYQ |
| NO: 6141 | LC_5 | variable region | QKPGKAPKMLIYENDKRPSGVPSRFSGSNSGNEATLT |
| | | humanized | ISSLQPDDFATYYCQSWDSTNSAVFGQGTKVEIK |
| | | variant 5 | |
| SEQ ID | 15H6- | 15H6 light chain | QYVLTQPPSASGTPGQRVTISCSGENLSDKYVHWYQ |
| NO: 6142 | LC_1 | variable region | QLPGTAPKMLIYENEKRPSGVPDRFSGSNSGNSASLAI |
| | | humanized | SGLQSEDEADYYCHYWESINSVVFGEGTELTVL |
| | | variant 1 | |
| SEQ ID | 15H6- | 15H6 light chain | QYVLTQPPSASGTPGQRVTISCSGENLSDKYVHWYQ |
| NO: 6143 | LC_2 | variable region | QLPGTAPKMLIYENEKRPSGVPDRFSGSNSGNSASLAI |
| | | humanized | SGLRSEDEADYYCHYWESINSVVFGEGTELTVL |
| | | variant 2 | |
| SEQ ID | 15H6- | 15H6 light chain | SYELTQPPSVSVSPGQTASITCSGENLSDKYVHWYQQ |
| NO: 6144 | LC_3 | variable region | KPGQSPVMVIYENEKRPSGIPERFSGSNSGNTATLTIS |
| | | humanized | GTQAMDEADYYCHYWESINSVVFGEGTELTVL |
| | | variant 3 | |
| SEQ ID | 15H6- | 15H6 light chain | DYVLTQSPLSLPVTPGEPASISCSGENLSDKYVHWYL |
| NO: 6145 | LC_4 | variable region | QKPGQSPQMLIYENEKRPSGVPDRFSGSNSGNDATLK |
| | | humanized | ISRVEAEDVGVYYCHYWESINSVVFGQGTKVEIK |
| | | variant 4 | |
| SEQ ID | 15H6- | 15H6 light chain | AYQLTQSPSSLSASVGDRVTITCSGENLSDKYVHWYQ |
| NO: 6146 | LC_5 | variable region | QKPGKAPKMLIYENEKRPSGVPSRFSGSNSGNDATLT |
| | | humanized | ISSLQPEDFATYYCHYWESINSVVFGQGTKVEIK |
| | | variant 5 | |
| SEQ ID | 15H6- | 15H6 light chain | EYVLTQSPATLSVSPGERATLSCSGENLSDKYVHWY |
| NO: 6147 | LC_6 | variable region | QQKPGQAPRMLIYENEKRPSGIPARFSGSNSGNEATL |
| | | humanized | TISSLQSEDFAVYYCHYWESINSVVFGQGTKVEIK |
| | | variant 6 | |
| SEQ ID | 9D9-HC | 9D9 heavy chain | QIQLQESGPGLVKPSQSLSLSCSVTGFSINTGGYHWN |
| NO: 7295 | | variable region | WIRQFPGKKVEWMGYIYSSGTTKYNPSLKSRISITRDT |
| | | | SKNQFFLQLNSVTTEDTATYYCARGDWHYFDYWGQ |
| | | | GTMVAVSS |
| SEQ ID | 9D9-LC | 9D9 light chain | SYTLTQPPLVSVALGQKATIICSGENLSDKYVHWYQQ |
| NO: 7296 | | variable region | KPGRAPVMVIYENDKRPSGIPDQFSGSNSGNIATLTIS |
| | | | KAQAGYEADYYCHCWDSTNSAVFGSGTHLTVL |
| SEQ ID | 3A12-HC | 3A12 heavy | QIQLQESGPGLVKPSQSLSLTCSVTGFSINTGGYHWN |
| NO: 7297 | | chain variable | WIRQFPGKKLEWMGYIYSSGSTRYNPSLKSRFSITRDT |
| | | region | SKNQFFLQLNSVTTEDTATYYCTRGNWHYFDYWGQ |
| | | | GTLVAVSS |
| SEQ ID | 3A12-LC | 3A12 light chain | SYTLTQPPLVSVALGQKATIICSGENLSDKYVHWYQQ |
| NO: 7296 | | variable region | KPGRAPVMVIYENDKRPSGIPDQFSGSNSGNIATLTIS |
| | | | KAQAGYEADYYCHCWDSTNSAVFGSGTHLTVL |
| SEQ ID | 12D10- | 12D10 heavy | QIQLQESGPGLVKPSQSLSLTCSVTGFSINTGGYHWN |
| NO: 6122 | HC | chain variable | WIRQFPGKKLEWMGYIYSSGTTRYNPSLKSRISITRDT |
| | | region | SKNQFFLQLNSVTPEDTATYYCTRGNWHYFDYWGQ |
| | | | GTLVAVSS |
| SEQ ID | 12D10- | 12D10 light | SYTLTQPPSLSVAPGQKATIICSGENLSDKYVHWYQQ |
| NO: 6136 | LC | chain variable | KPGRAPVMVIYENEKRPSGIPDQFSGSNSGNIATLTIS |
| | | region | KAQPGSEADYYCHYWESINSVVFGSGTHLTVL |
| SEQ ID | 15E1-HC | 15E1 heavy | QIQLQESGPGLVKPSQSLSLSCSVTGFSITTTGYHWN |
| NO: 7298 | | chain variable | WIRQFPGKKLEWMGYIYSSGSTSYNPSLKSRFSITRDT |
| | | region | SKNQFFLQLNSVTTEDTATYYCARGDWHYFDYWGP |
| | | | GTMVTVSS |
| SEQ ID | 15E1-LC | 15E1 light chain | SFTLTQPPLVSVAVGQVATITCSGEKLSDKYVHWYQ |
| NO: 7299 | | variable region | QKPGRAPVMVIYENDRRPSGIPDQFSGSNSGNIASLTI |
| | | | SKAQAGDEADYFCQFWDSTNSAVFGGGTQLTVL |
| SEQ ID | 15E1_ | 15E1 heavy | QIQLQESGPGLVKPSQTLSLTCTVSGFSITTTGYHWN |
| NO: 7300 | Humanized | chain variable | WIRQHPGKGLEWIGYIYSSGSTSYNPSLKSLVTISRDT |
| | variant_ | region | SKNQFSLKLSSVTAADTAVYYCARGDWHYFDYWGQ |
| | VH1 | humanized | GTMVTVSS |
| | | variant 1 | |
| SEQ ID | 15E1_ | 15E1 heavy | QIQLVESGGGLVKPGGSLRLSCAVSGFSITTTGYHWN |
| NO: 7301 | Humanized | chain variable | WIRQAPGKGLEWVGYIYSSGSTSYNPSLKSRFTISRDT |
| | variant_ | region | AKNSFYLQMNSLRAEDTAVYYCARGDWHYFDYWG |
| | VH2 | humanized | QGTMVTVSS |
| | | variant 2 | |
| SEQ ID | 15E1_ | 15E1 heavy | EIQLLESGGGLVQPGGSLRLSCAVSGFSITTTGYHWN |
| NO: 7302 | Humanized | chain variable | WVRQAPGKGLEWVGYIYSSGSTSYNPSLKSRFTISRD |
| | variant_ | region | TSKNTFYLQMNSLRAEDTAVYYCARGDWHYFDYW |
| | VH3 | humanized | GQGTMVTVSS |
| | (BJM0407 | variant 3 | |
| | VH and | | |
| | BJM0411 | | |
| | VH) | | |
| SEQ ID | 15E1_ | 15E1 heavy | EIQLVESGGGLVQPGGSLRLSCAVSGFSITTTGYHWN |
| NO: 7303 | Humanized | chain variable | WVRQAPGKGLEWVGYIYSSGSTSYNPSLKSRFTISRD |
| | variant_ | region | TAKNSFYLQMNSLRAEDTAVYYCARGDWHYFDYW |
| | VH4 | humanized | GQGTMVTVSS |
| | | variant 4 | |
| SEQ ID | 15E1_ | 15E1 heavy | QIQLVQSGAEVKKPGASVKVSCKVSGFSITTTGYHW |
| NO: 7304 | Humanized | chain variable | NWVRQAPGQGLEWMGYIYSSGSTSYNPSLKSRVTMT |
| | variant_ | region | RDTSTNTFYMELSSLRSEDTAVYYCARGDWHYFDY |
| | VH5 | humanized | WGQGTMVTVSS |
| | | variant 5 | |
| SEQ ID | 15E1_ | 15E1 light chain | SSETTQPPSVSVSPGQTASITCSGEKLSDKYVHWYQQ |
| NO: 7305 | Humanized | variable region | KPGQSPVMVIYENDRRPSGIPERFSGSNSGNTATLTIS |
| | variant_ | humanized | GTQAMDEADYFCQFWDSTNSAVFGGGTQLTVL |
| | VL1 | variant 1 | |
| | (BJM0407 | | |
| | VL) | | |
| SEQ ID | 15E1_ | 15E1 light chain | SSETTQPHSVSVATAQMARITCSGEKLSDKYVHWYQ |
| NO: 7306 | mHuanized | variable region | QKPGQDPVMVIYENDRRPSGIPERFSGSNPGNTATLTI |
| | variant_ | humanized | SRIEAGDEADYFCQFWDSTNSAVFGGGTQLTVL |
| | VL2 | variant 2 | |
| SEQ ID | 15E1_ | 15E1 light chain | QSVTTQPPSASGTPGQRVTISCSGEKLSDKYVHWYQQ |
| NO: 7307 | Humanized | variable region | LPGTAPKMLIYENDRRPSGVPDRFSGSNSGNSASLAIS |
| | variant_ | humanized | GLRSEDEADYFCQFWDSTNSAVFGGGTQLTVL |
| | VL3 | variant 3 | |
| SEQ ID | 15E1_ | 15E1 light chain | QSVTTQPPSVSGAPGQRVTISCSGEKLSDKYVHWYQ |
| NO: 7308 | Humanized | variable region | QLPGTAPKMLIYENDRRPSGVPDRFSGSNSGNSASLAI |
| | variant_ | humanized | TGLQAEDEADYFCQFWDSTNSAVFGGGTQLTVL |
| | VL4 | variant 4 | |
| SEQ ID | 15E1_ | 15E1 light chain | DSVTTQSPLSLPVTLGQPASISCSGEKLSDKYVHWYQ |
| NO: 7309 | Humanized | variable region | QRPGQSPRMLIYENDRRPSGVPDRFSGSNSGNDATLK |
| | variant_ | humanized | ISRVEAEDVGVYFCQFWDSTNSAVFGGGTKVEIK |
| | VL5 | variant 5 | |
| | (BJM0411 | | |
| | VL) | | |

TABLE 10A
Exemplary NKp30-targeting antigen binding domains/antibody molecules

| SEQ ID | | | |
|---|---|---|---|
| NO | Ab ID | Description | Sequence |
| SEQ ID | Ch(anti- | 9G1 heavy chain | QIQLQESGPGLVKPSQSLSLTCSVTGFSINTGGYHWN |
| NO: 6148 | NKp30 | | WIRQFPGKKLEWMGYIYSSGSTSYNPSLKSRISITRDT |
| | 9G1)HC | | SKNQFFLQLNSVTTEDTATYYCARGNWHYFDFWGQ |
| | N297A | | GTMVTVSSASTKGPSVFPLAPSSKSTSGGTAALGCLV |
| | | | KDYFPEPVTVSWNSGALTSGVHTFPAVLQSSGLYSLS |
| | | | SVVTVPSSSLGTQTYICNVNHKPSNTKVDKRVEPKSC |
| | | | DKTHTCPPCPAPELLGGPSVFLFPPKPKDTLMISRTPE |
| | | | VTCVVVDVSHEDPEVKFNWYVDGVEVHNAKTKPRE |
| | | | EQYASTYRVVSVLTVLHQDWLNGKEYKCKVSNKAL |
| | | | PAPIEKTISKAKGQPREPQVCTLPPSREEMTKNQVSLS |
| | | | CAVKGFYPSDIAVEWESNGQPENNYKTTPPVLDSDGS |
| | | | FFLVSKLTVDKSRWQQGNVFSCSVMHEALHNHYTQ |
| | | | KSLSLSPGK |
| SEQ ID | Ch(anti- | 9G1 heavy chain | QIQLQESGPGLVKPSQSLSLTCSVTGFSINTGGYHWN |
| NO: 6149 | NKp30 | | WIRQFPGKKLEWMGYIYSSGSTSYNPSLKSRISITRDT |
| | 9G1)HC | | SKNQFFLQLNSVTTEDTATYYCARGNWHYFDFWGQ |
| | | | GTMVTVSSASTKGPSVFPLAPSSKSTSGGTAALGCLV |
| | | | KDYFPEPVTVSWNSGALTSGVHTFPAVLQSSGLYSLS |
| | | | SVVTVPSSSLGTQTYICNVNHKPSNTKVDKRVEPKSC |
| | | | DKTHTCPPCPAPELLGGPSVFLFPPKPKDTLMISRTPE |
| | | | VTCVVVDVSHEDPEVKFNWYVDGVEVHNAKTKPRE |
| | | | EQYNSTYRVVSVLTVLHQDWLNGKEYKCKVSNKAL |
| | | | PAPIEKTISKAKGQPREPQVCTLPPSREEMTKNQVSLS |
| | | | CAVKGFYPSDIAVEWESNGQPENNYKTTPPVLDSDGS |
| | | | FFLVSKLTVDKSRWQQGNVFSCSVMHEALHNHYTQ |
| | | | KSLSLSPGK |
| SEQ ID | Ch(anti- | 9G1 light chain | SYTLTQPPLLSVALGHKATITCSGERLSDKYVHWYQQ |
| NO: 6150 | NKp30 | | KPGRAPVMVIYENDKRPSGIPDQFSGSNSGNIATLTIS |
| | 9G1)LC | | KAQAGYEADYYCQSWDSTNSAVFGSGTQLTVLGQP |
| | | | KANPTVTLFPPSSEELQANKATLVCLISDFYPGAVTV |
| | | | AWKADGSPVKAGVETTKPSKQSNNKYAASSYLSLTP |
| | | | EQWKSHRSYSCQVTHEGSTVEKTVAPTECS |
| SEQ ID | Ch(anti- | 15H6 heavy | QIQLQESGPGLVKPSQSLSLTCSVTGFSINTGGYHWN |
| NO: 6151 | NKp30 | chain | WIRQFPGKKLEWMGYIYSSGTTRYNPSLKSRISITRDT |
| | 15H6)HC | | SKNQFFLQLNSVTPEDTATYYCTRGNWHYFDYWGQ |
| | N297A | | GTLVAVSSASTKGPSVFPLAPSSKSTSGGTAALGCLV |
| | | | KDYFPEPVTVSWNSGALTSGVHTFPAVLQSSGLYSLS |
| | | | SVVTVPSSSLGTQTYICNVNHKPSNTKVDKRVEPKSC |
| | | | DKTHTCPPCPAPELLGGPSVFLFPPKPKDTLMISRTPE |
| | | | VTCVVVDVSHEDPEVKFNWYVDGVEVHNAKTKPRE |
| | | | EQYASTYRVVSVLTVLHQDWLNGKEYKCKVSNKAL |
| | | | PAPIEKTISKAKGQPREPQVCTLPPSREEMTKNQVSLS |
| | | | CAVKGFYPSDIAVEWESNGQPENNYKTTPPVLDSDGS |
| | | | FFLVSKLTVDKSRWQQGNVFSCSVMHEALHNHYTQ |
| | | | KSLSLSPGK |
| SEQ ID | Ch(anti- | 15H6 heavy | QIQLQESGPGLVKPSQSLSLTCSVTGFSINTGGYHWN |
| NO: 6152 | NKp30 | chain | WIRQFPGKKLEWMGYIYSSGTTRYNPSLKSRISITRDT |
| | 15H6)HC | | SKNQFFLQLNSVTPEDTATYYCTRGNWHYFDYWGQ |
| | (hole) | | GTLVAVSSASTKGPSVFPLAPSSKSTSGGTAALGCLV |
| | | | KDYFPEPVTVSWNSGALTSGVHTFPAVLQSSGLYSLS |
| | | | SVVTVPSSSLGTQTYICNVNHKPSNTKVDKRVEPKSC |
| | | | DKTHTCPPCPAPELLGGPSVFLFPPKPKDTLMISRTPE |
| | | | VTCVVVDVSHEDPEVKFNWYVDGVEVHNAKTKPRE |
| | | | EQYNSTYRVVSVLTVLHQDWLNGKEYKCKVSNKAL |
| | | | PAPIEKTISKAKGQPREPQVCTLPPSREEMTKNQVSLS |
| | | | CAVKGFYPSDIAVEWESNGQPENNYKTTPPVLDSDGS |
| | | | FFLVSKLTVDKSRWQQGNVFSCSVMHEALHNHYTQ |
| | | | KSLSLSPGK |
| SEQ ID | Ch(anti- | 15H6 light chain | SYTLTQPPSLSVAPGQKATIICSGENLSDKYVHWYQQ |
| NO: 6153 | NKp30 | | KPGRAPVMVIYENEKRPSGIPDQFSGSNSGNIATLTIS |
| | 15H6)LC | | KAQPGSEADYYCHYWESINSVVFGSGTHLTVLGQPK |
| | | | ANPTVTLFPPSSEELQANKATLVCLISDFYPGAVTVA |
| | | | WKADGSPVKAGVETTKPSKQSNNKYAASSYLSLTPE |
| | | | QWKSHRSYSCQVTHEGSTVEKTVAPTECS |
| SEQ ID | BJM0859 | | EIQLLESGGGLVQPGGSLRLSCAVSGFSITTTGYHWN |
| NO: 7310 | lambda | | WVRQAPGKGLEWVGYIYSSGSTSYNPSLKSRFTISRD |
| | scFv | | TSKNTFYLQMNSLRAEDTAVYYCARGDWHYFDYW |
| | | | GQGTMVTVSSGGGGSGGGGSGGGGSGGGGSSSETTQ |
| | | | PPSVSVSPGQTASITCSGEKLSDKYVHWYQQKPGQSP |
| | | | VMVIYENDRRPSGIPERFSGSNSGNTATLTISGTQAMD |
| | | | EADYFCQFWDSTNSAVFGGGTQLTVL |
| SEQ ID | BJM0860 | | EIQLLESGGGLVQPGGSLRLSCAVSGFSITTTGYHWN |
| NO: 7311 | kappa | | WVRQAPGKGLEWVGYIYSSGSTSYNPSLKSRFTISRD |
| | scFv | | TSKNTFYLQMNSLRAEDTAVYYCARGDWHYFDYW |
| | | | GQGTMVTVSSGGGGSGGGGSGGGGSGGGGSDSVTT |
| | | | QSPLSLPVTLGQPASISCSGEKLSDKYVHWYQQRPGQ |
| | | | SPRMLIYENDRRPSGVPDRFSGSNSGNDATLKISRVEA |
| | | | EDVGVYFCQFWDSTNSAVFGGGTKVEIK |

[0665] In some embodiments, the NK cell engager is an antigen binding domain that binds to NKp46 (e.g., NKp46 present, e.g., expressed or displayed, on the surface of an NK cell) and comprises any CDR amino acid sequence, framework region (FWR) amino acid sequence, or variable region amino acid sequence disclosed in Table 10B. In some embodiments, binding of the NK cell engager, e.g., antigen binding domain that binds to NKp46, to the NK cell activates the NK cell. An antigen binding domain that binds to NKp46 (e.g., NKp46 present, e.g., expressed or displayed, on the surface of an NK cell) may be said to target NKp46, the NK cell, or both.

[0666] In some embodiments, the NK cell engager is an antigen binding domain that binds to NKG2D (e.g., NKG2D present, e.g., expressed or displayed, on the surface of an NK cell) and comprises any CDR amino acid sequence, framework region (FWR) amino acid sequence, or variable region amino acid sequence disclosed in Table 10B. In some embodiments, binding of the NK cell engager, e.g., antigen binding domain that binds to NKG2D, to the NK cell activates the NK cell. An antigen binding domain that binds to NKG2D (e.g., NKG2D present, e.g., expressed or displayed, on the surface of an NK cell) may be said to target NKG2D, the NK cell, or both.

[0667] In some embodiments, the NK cell engager is an antigen binding domain that binds to CD16 (e.g., CD16 present, e.g., expressed or displayed, on the surface of an NK cell) and comprises any CDR amino acid sequence, framework region (FWR) amino acid sequence, or variable region amino acid sequence disclosed in Table 10B. In some embodiments, binding of the NK cell engager, e.g., antigen binding domain that binds to CD16, to the NK cell activates the NK cell. An antigen binding domain that binds to CD16 (e.g., CD16 present, e.g., expressed or displayed, on the surface of an NK cell) may be said to target CD16, the NK cell, or both.

TABLE 10B
Exemplary variable regions of NKp46, NKG2D, or CD16-targeting antigen binding
domains

| SEQ ID | | | |
|---|---|---|---|
| NO | Ab ID | Description | Sequence |
| SEQ ID | NKG2D_ | scFV that binds | QVHLQESGPGLVKPSETLSLTCTVSDDSISSYYWSWIR |
| NO: 6175 | 1scFV | NKG2D | QPPGKGLEWIGHISYSGSANYNPSLKSRVTISVDTSKN |
| | | | QFSLKLSSVTAADTAVYYCANWDDAFNIWGQGTMV |
| | | | TVSSGGGGSGGGGSGGGGSGGGGSEIVLTQSPGTLSL |
| | | | SPGERATLSCRASQSVSSSYLAWYQQKPGQAPRLLIY |
| | | | GASSRATGIPDRFSGSGSGTDFTLTISRLEPEDFAVYY |
| | | | CQQYGSSPWTFGQGTKVEIK |
| SEQ ID | NKG2D_ | VH that binds | QVHLQESGPGLVKPSETLSLTCTVSDDSISSYYWSWIR |
| NO: 6176 | 1VH | NKG2D | QPPGKGLEWIGHISYSGSANYNPSLKSRVTISVDTSKN |
| | | | QFSLKLSSVTAADTAVYYCANWDDAFNIWGQGTMV |
| | | | TVSS |
| SEQ ID | NKG2D_ | VL that binds | EIVLTQSPGTLSLSPGERATLSCRASQSVSSSYLAWYQ |
| NO: 6177 | 1VL | NKG2D | QKPGQAPRLLIYGASSRATGIPDRFSGSGSGTDFTLTIS |
| | | | RLEPEDFAVYYCQQYGSSPWTFGQGTKVEIK |
| SEQ ID | NKG2D_ | scFV that binds | EVQLVQSGAEVKEPGESLKISCKNSGYSFTNYWVGW |
| NO: 6178 | 2scFV | NKG2D | VRQMPGKGLEWMGIIYPGDSDTRYSPSFQGQVTISAD |
| | | | KSINTAYLQWSSLKASDTAMYYCGRLTMFRGIIIGYF |
| | | | DYWGQGTLVTVSSGGGGSGGGGSGGGGSGGGGSEI |
| | | | VLTQSPATLSLSPGERATLSCRASQSVSSYLAWYQQK |
| | | | PGQAPRLLIYDASNRATGIPARFSGSGSGTDFTLTISSL |
| | | | EPEDFAVYYCQQRSNWPWTFGQGTKVEIK |
| SEQ ID | NKG2D_ | VH that binds | EVQLVQSGAEVKEPGESLKISCKNSGYSFTNYWVGW |
| NO: 6179 | 2VH | NKG2D | VRQMPGKGLEWMGIIYPGDSDTRYSPSFQGQVTISAD |
| | | | KSINTAYLQWSSLKASDTAMYYCGRLTMFRGIIIGYF |
| | | | DYWGQGTLVTVSS |
| SEQ ID | NKG2D_ | VL that binds | EIVLTQSPATLSLSPGERATLSCRASQSVSSYLAWYQQ |
| NO: 6180 | 2VL | NKG2D | KPGQAPRLLIYDASNRATGIPARFSGSGSGTDFTLTISS |
| | | | LEPEDFAVYYCQQRSNWPWTFGQGTKVEIK |
| SEQ ID | NKp46scFV | scFV that binds | QVQLQQSGPELVKPGASVKMSCKASGYTFTDYVINW |
| NO: 6181 | | NKp46 | GKQRSGQGLEWIGEIYPGSGTNYYNEKFKAKATLTA |
| | | | DKSSNIAYMQLSSLTSEDSAVYFCARRGRYGLYAMD |
| | | | YWGQGTSVTVSSGGGGSGGGGSGGGGSGGGGSDIQ |
| | | | MTQTTSSLSASLGDRVTISCRASQDISNYLNWYQQKP |
| | | | DGTVKLLIYYTSRLHSGVPSRFSGSGSGTDYSLTINNL |
| | | | EQEDIATYFCQQGNTRPWTFGGGTKLEIK |
| SEQ ID | NKp46VH | VH that binds | QVQLQQSGPELVKPGASVKMSCKASGYTFTDYVINW |
| NO: 6182 | | NKp46 | GKQRSGQGLEWIGEIYPGSGTNYYNEKFKAKATLTA |
| | | | DKSSNIAYMQLSSLTSEDSAVYFCARRGRYGLYAMD |
| | | | YWGQGTSVTVSS |
| SEQ ID | NKp46VL | VL that binds | DIQMTQTTSSLSASLGDRVTISCRASQDISNYLNWYQ |
| NO: 6183 | | NKp46 | QKPDGTVKLLIYYTSRLHSGVPSRFSGSGSGTDYSLTI |
| | | | NNLEQEDIATYFCQQGNTRPWTFGGGTKLEIK |
| SEQ ID | CD16scFV | scFV that binds | EVQLVESGG GVVRPGGSLR LSCAASGFTF |
| NO: 6184 | | CD16 | DDYGMSWVRQ APGKGLEWVS |
| | | | GINWNGGSTG YADSVKGRFT ISRDNAKNSL |
| | | | YLQMNSLRAE DTAVYYCARG |
| | | | RSLLFDYWGQ GTLVTVSRGG GGSGGGGSGG |
| | | | GGSSELTQDP AVSVALGQTV |
| | | | RITCQGDSLR SYYASWYQQK PGQAPVLVIY |
| | | | GKNNRPSGIP DRFSGSSSGN |
| | | | TASLTITGAQ AEDEADYYCN SRDSSGNHVV |
| | | | FGGGTKLTVL |
| SEQ ID | CD16VH | VH that binds | EVQLVESGG GVVRPGGSLR LSCAASGFTF |
| NO: 6185 | | CD16 | DDYGMSWVRQ APGKGLEWVS |
| | | | GINWNGGSTG YADSVKGRFT ISRDNAKNSL |
| | | | YLQMNSLRAE DTAVYYCARG |
| | | | RSLLFDYWGQ GTLVTVSR |
| SEQ ID | CD16VL | VL that binds | SSELTQDP AVSVALGQTVRITCQGDSLR |
| NO: 6186 | | CD16 | SYYASWYQQK PGQAPVLVIY GKNNRPSGIP |
| | | | DRFSGSSSGNTASLTITGAQ AEDEADYYCN |
| | | | SRDSSGNHVV FGGGTKLTVL |

[0668] In one embodiment, the NK cell engager is a ligand of NKp30, e.g., is a B7-6, e.g., comprises the amino acid sequence of: DLKVEMMAGGTQITPLNDNVTIFCNIFYSQPLNITSMGITWFWKSLTFDKEVKVFEFFGDHQEAF RPGAIVSPWRLKSGDASLRLPGIQLEEAGEYRCEVVVTPLKAQGTVQLEVVASPASRLLLDQVG MKENEDKYMCESSGFYPEAINITWEKQTQKFPHPIEISEDVITGPTIKNMDGTFNVTSCLKLNSSQ EDPGTVYQCVVRHASLHTPLRSNFTLTAARHSLSETEKTDNFS (SEQ ID NO: 7233), a fragment thereof, or an amino acid sequence substantially identical thereto (e.g., 95% to 99.9% identical thereto, or having at least one amino acid alteration, but not more than five, ten or fifteen alterations (e.g., substitutions, deletions, or insertions, e.g., conservative substitutions) to the amino acid sequence of SEQ ID NO: 7233.

[0669] In other embodiments, the NK cell engager is a ligand of NKp44 or NKp46, which is a viral HA. Viral hemagglutinins (HA) are glyco proteins which are on the surface of viruses. HA proteins allow viruses to bind to the membrane of cells via sialic acid sugar moieties which contributes to the fusion of viral membranes with the cell membranes (see e.g., Eur J Immunol. 2001 September; 31(9):2680-9 “Recognition of viral hemagglutinins by NKp44 but not by NKp30”; and Nature. 2001 Feb. 22; 409(6823):1055-60 “Recognition of haemagglutinins on virus-infected cells by NKp46 activates lysis by human NK cells” the contents of each of which are incorporated by reference herein).

[0670] In other embodiments, the NK cell engager is a ligand of NKG2D chosen from MICA, MICB, or ULBP1, e.g., wherein:
[0671] (i) MICA comprises the amino acid sequence: EPHSLRYNLTVLSWDGSVQSGFLTEVHLDGQPFLRCDRQKCRAKPQGQWAEDVLGNKTWDRE TRDLTGNGKDLRMTLAHIKDQKEGLHSLQEIRVCEIHEDNSTRSSQHFYYDGELFLSQNLETKEW TMPQSSRAQTLAMNVRNFLKEDAMKTKTHYHAMHADCLQELRRYLKSGVVLRRTVPPMVNVT RSEASEGNITVTCRASGFYPWNITLSWRQDGVSLSHDTQQWGDVLPDGNGTYQTWVATRICQG EEQRFTCYMEHSGNHSTHPVPSGKVLVLQSHW (SEQ ID NO: 7234), a fragment thereof, or an amino acid sequence substantially identical thereto (e.g., 95% to 99.9% identical thereto, or having at least one amino acid alteration, but not more than five, ten or fifteen alterations (e.g., substitutions, deletions, or insertions, e.g., conservative substitutions) to the amino acid sequence of SEQ ID NO: 7234;
[0672] (ii) MICB comprises the amino acid sequence: AEPHSLRYNLMVLSQDESVQSGFLAEGHLDGQPFLRYDRQKRRAKPQGQWAEDVLGAKTWDT ETEDLTENGQDLRRTLTHIKDQKGGLHSLQEIRVCEIHEDSSTRGSRHFYYDGELFLSQNLETQES TVPQSSRAQTLAMNVTNFWKEDAMKTKTHYRAMQADCLQKLQRYLKSGVAIRRTVPPMVNVT CSEVSEGNITVTCRASSFYPRNITLTWRQDGVSLSHNTQQWGDVLPDGNGTYQTWVATRIRQGE EQRFTCYMEHSGNHGTHPVPSGKVLVLQSQRTD (SEQ ID NO: 7235), a fragment thereof, or an amino acid sequence substantially identical thereto (e.g., 95% to 99.9% identical thereto, or having at least one amino acid alteration, but not more than five, ten or fifteen alterations (e.g., substitutions, deletions, or insertions, e.g., conservative substitutions) to the amino acid sequence of SEQ ID NO: 7235; or
[0673] (iii) ULBP1 comprises the amino acid sequence: GWVDTHCLCYDFIITPKSRPEPQWCEVQGLVDERPFLHYDCVNHKAKAFASLGKKVNVTKTWE EQTETLRDVVDFLKGQLLDIQVENLIPIEPLTLQARMSCEHEAHGHGRGSWQFLFNGQKFLLFDS NNRKWTALHPGAKKMTEKWEKNRDVTMFFQKISLGDCKMWLEEFLMYWEQMLDPTKPPSLA PG (SEQ ID NO: 7236), a fragment thereof, or an amino acid sequence substantially identical thereto (e.g., 95% to 99.9% identical thereto, or having at least one amino acid alteration, but not more than five, ten or fifteen alterations (e.g., substitutions, deletions, or insertions, e.g., conservative substitutions) to the amino acid sequence of SEQ ID NO: 7236.

[0674] In other embodiments, the NK cell engager is a ligand of DNAM1 chosen from NECTIN2 or NECL5, e.g., wherein:
[0675] (i) NECTIN2 comprises the amino acid sequence: QDVRVQVLPEVRGQLGGTVELPCHLLPPVPGLYISLVTWQRPDAPANHQNVAAFHPKMGPSFPS PKPGSERLSFVSAKQSTGQDTEAELQDATLALHGLTVEDEGNYTCEFATFPKGSVRGMTWLRVI AKPKNQAEAQKVTFSQDPTTVALCISKEGRPPARISWLSSLDWEAKETQVSGTLAGTVTVTSRFT LVPSGRADGVTVTCKVEHESFEEPALIPVTLSVRYPPEVSISGYDDNWYLGRTDATLSCDVRSNP EPTGYDWSTTSGTFPTSAVAQGSQLVIHAVDSLFNTTFVCTVTNAVGMGRAEQVIFVRETPNTA GAGATGG (SEQ ID NO: 7237), a fragment thereof, or an amino acid sequence substantially identical thereto (e.g., 95% to 99.9% identical thereto, or having at least one amino acid alteration, but not more than five, ten or fifteen alterations (e.g., substitutions, deletions, or insertions, e.g., conservative substitutions) to the amino acid sequence of SEQ ID NO: 7237; or
[0676] (ii) NECL5 comprises the amino acid sequence: WPPPGTGDVVVQAPTQVPGFLGDSVTLPCYLQVPNMEVTHVSQLTWARHGESGSMAVFHQTQ GPSYSESKRLEFVAARLGAELRNASLRMFGLRVEDEGNYTCLFVTFPQGSRSVDIWLRVLAKPQ NTAEVQKVQLTGEPVPMARCVSTGGRPPAQITWHSDLGGMPNTSQVPGFLSGTVTVTSLWILVP SSQVDGKNVTCKVEHESFEKPQLLTVNLTVYYPPEVSISGYDNNWYLGQNEATLTCDARSNPEP TGYNWSTTMGPLPPFAVAQGAQLLIRPVDKPINTTLICNVTNALGARQAELTVQVKEGPPSEHSG ISRN (SEQ ID NO: 7238), a fragment thereof, or an amino acid sequence substantially identical thereto (e.g., 95% to 99.9% identical thereto, or having at least one amino acid alteration, but not more than five, ten or fifteen alterations (e.g., substitutions, deletions, or insertions, e.g., conservative substitutions) to the amino acid sequence of SEQ ID NO: 7238.

[0677] In yet other embodiments, the NK cell engager is a ligand of DAP10, which is an adapter for NKG2D (see e.g., Proc Natl Acad Sci USA. 2005 May 24; 102(21): 7641-7646; and Blood, 15 Sep. 2011 Volume 118, Number 11, the full contents of each of which is incorporated by reference herein).

[0678] In other embodiments, the NK cell engager is a ligand of CD16, which is a CD16a/b ligand, e.g., a CD16a/b ligand further comprising an antibody Fc region (see e.g., Front Immunol. 2013; 4: 76 discusses how antibodies use the Fe to trigger NK cells through CD16,the full contents of which are incorporated herein).

[0679] In other embodiments, the NK cell engager is a ligand of CRTAM, which is NECL2, e.g., wherein NECL2 comprises the amino acid sequence: QNLFTKDVTVIEGEVATISCQVNKSDDSVIQLLNPNRQTIYFRDFRPLKDSRFQLLNFSSSELKVSL TNVSISDEGRYFCQLYTDPPQESYTTITVLVPPRNLMIDIQKDTAVEGEEIEVNCTAMASKPATTIR WFKGNTELKGKSEVEEWSDMYTVTSQLMLKVHKEDDGVPVICQVEHPAVTGNLQTQRYLEVQ YKPQVHIQMTYPLQGLTREGDALELTCEAIGKPQPVMVTWVRVDDEMPQHAVLSGPNLFINNL NKTDNGTYRCEASNIVGKAHSDYMLYVYDPPTTIPPPTTTTTTTTTTTTTILTIITDSRAGEEGSIR AVDH (SEQ ID NO: 7239), a fragment thereof, or an amino acid sequence substantially identical thereto (e.g., 95% to 99.9% identical thereto, or having at least one amino acid alteration, but not more than five, ten or fifteen alterations (e.g., substitutions, deletions, or insertions, e.g., conservative substitutions) to the amino acid sequence of SEQ ID NO: 7239.

[0680] In other embodiments, the NK cell engager is a ligand of CD27, which is CD70, e.g., wherein CD70 comprises the amino acid sequence: QRFAQAQQQLPLESLGWDVAELQLNHTGPQQDPRLYWQGGPALGRSFLHGPELDKGQLRIHRD GIYMVHIQVTLAICSSTTASRHHPTTLAVGICSPASRSISLLRLSFHQGCTIASQRLTPLARGDTLCT NLTGTLLPSRNTDETFFGVQWVRP (SEQ ID NO: 7240), a fragment thereof, or an amino acid sequence substantially identical thereto (e.g., 95% to 99.9% identical thereto, or having at least one amino acid alteration, but not more than five, ten or fifteen alterations (e.g., substitutions, deletions, or insertions, e.g., conservative substitutions) to the amino acid sequence of SEQ ID NO: 7240.

[0681] In other embodiments, the NK cell engager is a ligand of PSGL1, which is L-selectin (CD62L), e.g., wherein L-selectin comprises the amino acid sequence: WTYHYSEKPMNWQRARRFCRDNYTDLVAIQNKAEIEYLEKTLPFSRSYYWIGIRKIGGIWTWVG TNKSLTEEAENWGDGEPNNKKNKEDCVEIYIKRNKDAGKWNDDACHKLKAALCYTASCQPWS CSGHGECVEIINNYTCNCDVGYYGPQCQFVIQCEPLEAPELGTMDCTHPLGNFSFSSQCAFSCSEG TNLTGIEETTCGPFGNWSSPEPTCQVIQCEPLSAPDLGIMNCSHPLASFSFTSACTFICSEGTELIGK KKTICESSGIWSNPSPICQKLDKSFSMIKEGDYN (SEQ ID NO: 7241), a fragment thereof, or an amino acid sequence substantially identical thereto (e.g., 95% to 99.9% identical thereto, or having at least one amino acid alteration, but not more than five, ten or fifteen alterations (e.g., substitutions, deletions, or insertions, e.g., conservative substitutions) to the amino acid sequence of SEQ ID NO: 7241.

[0682] In other embodiments, the NK cell engager is a ligand of CD96, which is NECL5, e.g., wherein NECL5 comprises the amino acid sequence: WPPPGTGDVVVQAPTQVPGFLGDSVTLPCYLQVPNMEVTHVSQLTWARHGESGSMAVFHQTQ GPSYSESKRLEFVAARLGAELRNASLRMFGLRVEDEGNYTCLFVTFPQGSRSVDIWLRVLAKPQ NTAEVQKVQLTGEPVPMARCVSTGGRPPAQITWHSDLGGMPNTSQVPGFLSGTVTVTSLWILVP SSQVDGKNVTCKVEHESFEKPQLLTVNLTVYYPPEVSISGYDNNWYLGQNEATLTCDARSNPEP TGYNWSTTMGPLPPFAVAQGAQLLIRPVDKPINTTLICNVTNALGARQAELTVQVKEGPPSEHSG ISRN (SEQ ID NO: 7238), a fragment thereof, or an amino acid sequence substantially identical thereto (e.g., 95% to 99.9% identical thereto, or having at least one amino acid alteration, but not more than five, ten or fifteen alterations (e.g., substitutions, deletions, or insertions, e.g., conservative substitutions) to the amino acid sequence of SEQ ID NO: 7239.

[0683] In other embodiments, the NK cell engager is a ligand of CD100 (SEMA4D), which is CD72, e.g., wherein CD72 comprises the amino acid sequence:

(SEQ ID NO: 7242)
RYLQVSQQLQQTNRVLEVINSSLRQQLRLKITQLGQSAEDLQGSRRELA
QSQEALQVEQRAHQAAEGQLQACQADRQKTKETLQSEEQQRRALEQKLS
NMENRLKPFFTCGSADTCCPSGWIMHQKSCFYISLTSKNWQESQKQCET
LSSKLATFSEIYPQSHSYYFLNSLLPNGGSGNSYWTGLSSNKDWKLTDD
TQRTRTYAQSSKCNKVHKTWSWWTLESESCRSSLPYICEMTAFRFPD,

a fragment thereof, or an amino acid sequence substantially identical thereto (e.g., 95% to 99.9% identical thereto, or having at least one amino acid alteration, but not more than five, ten or fifteen alterations (e.g., substitutions, deletions, or insertions, e.g., conservative substitutions) to the amino acid sequence of SEQ ID NO: 7242.

[0684] In other embodiments, the NK cell engager is a ligand of NKp80, which is CLEC2B (AICL), e.g., wherein CLEC2B (AICL) comprises the amino acid sequence: KLTRDSQSLCPYDWIGFQNKCYYFSKEEGDWNSSKYNCSTQHADLTIIDNIEEMNFLRRYKCSSD HWIGLKMAKNRTGQWVDGATFTKSFGMRGSEGCAYLSDDGAATARCYTERKWICRKRIH (SEQ ID NO: 7243), a fragment thereof, or an amino acid sequence substantially identical thereto (e.g., 95% to 99.9% identical thereto, or having at least one amino acid alteration, but not more than five, ten or fifteen alterations (e.g., substitutions, deletions, or insertions, e.g., conservative substitutions) to the amino acid sequence of SEQ ID NO: 7243.

[0685] In other embodiments, the NK cell engager is a ligand of CD244, which is CD48, e.g., wherein CD48 comprises the amino acid sequence: QGHLVHMTVVSGSNVTLNISESLPENYKQLTWFYTFDQKIVEWDSRKSKYFESKFKGRVRLDPQ SGALYISKVQKEDNSTYIMRVLKKTGNEQEWKIKLQVLDPVPKPVIKIEKIEDMDDNCYLKLSCV IPGESVNYTWYGDKRPFPKELQNSVLETTLMPHNYSRCYTCQVSNSVSSKNGTVCLSPPCTLARS (SEQ ID NO: 7244), a fragment thereof, or an amino acid sequence substantially identical thereto (e.g., 95% to 99.9% identical thereto, or having at least one amino acid alteration, but not more than five, ten or fifteen alterations (e.g., substitutions, deletions, or insertions, e.g., conservative substitutions) to the amino acid sequence of SEQ ID NO: 7244.

[0686] In some embodiments, the NK cell engager is a viral hemagglutinin (HA), HA is a glycoprotein found on the surface of influenza viruses. It is responsible for binding the virus to cells with sialic acid on the membranes, such as cells in the upper respiratory tract or erythrocytes. HA has at least 18 different antigens. These subtypes are named H1 through H18. NCRs can recognize viral proteins. NKp46 has been shown to be able to interact with the HA of influenza and the HA-NA of Paramyxovirus, including Sendai virus and Newcastle disease virus. Besides NKp46, NKp44 can also functionally interact with HA of different influenza subtypes.

### Death Receptor Signal Engagers

[0687] Death receptors, e.g., death receptors 4 and 5 (DR4 and DR5, also known as TRAIL-RI and TRAIL-R2 respectively), are trimeric type I transmembrane proteins widely expressed in normal human tissues. Activation of death receptors causes intracellular signaling that induces cell death. TNF-related apoptosis-inducing ligand (TRAIL) (also known as Apo2L) is a trimeric protein that binds to Death receptors, activating their cell death-inducing signaling (Amarante-Mendes and Griffith. Pharmacol Ther. 2015 November; 155:117-31).

[0688] The present disclosure provides, inter alia, TCR targeting molecules that are engineered to contain one or more death receptor signal engagers that mediate binding to death receptors and/or activation of death receptor signaling on a target cell (e.g., the T cell comprising a TCRAV or TCRBV antigen (e.g., a TCRAV or TCRBV antigen corresponding to a biased TCRBV clonotype). Accordingly, in some embodiments, the death receptor signal engager comprises one or more TRAIL polypeptides or a fragment thereof (TRAIL molecule), one or more death receptors or a fragment thereof (death receptor molecule), or one or more antigen binding domains that specifically binds to a death receptor (e.g., and activates death receptor signaling). Without wishing to be bound by theory, it is thought that a death receptor signal engager that can activate death receptor signaling on a target cell can induce the death of the target cell, e.g., a target disease cell (e.g., a T cell comprising a TCRAV or TCRBV antigen (e.g., a TCRAV or TCRBV antigen corresponding to a biased TCRAV or TCRBV clonotype).

[0689] Death receptor signal engagers may comprise TRAIL molecules and/or death receptor molecules from or derived from versions of TRAIL and death receptors known to those skilled in the art. In some embodiments, the death receptor signal engager comprises a human TRAIL molecule or death receptor molecule. In some embodiments, the death receptor signal engager comprises a mouse TRAIL molecule or death receptor molecule. In some embodiments, the death receptor signal engager comprises a mammalian TRAIL molecule or death receptor molecule. In some embodiments, the death receptor signal engager comprises a truncated TRAIL molecule or death receptor molecule (e.g., relative to a wild-type TRAIL molecule or death receptor molecule).

[0690] In some embodiments, the death receptor signal engager comprises a truncated TRAIL molecule comprising at least residues corresponding to amino acids 95-281 of human TRAIL, e.g., a truncated TRAIL molecule comprising residues corresponding to amino acids 95-281 of human TRAIL. In some embodiments, the death receptor signal engager comprises a truncated TRAIL molecule comprising residues of 95-281 of human TRAIL.

[0691] In some embodiments, the death receptor signal engager comprises a truncated TRAIL molecule comprising at least residues corresponding to amino acids 122-281 of human TRAIL, e.g., a truncated TRAIL molecule comprising residues corresponding to amino acids 122-281 of human TRAIL. In some embodiments, the death receptor signal engager comprises a truncated TRAIL molecule comprising residues of 122-281 of human TRAIL.

[0692] In some embodiments, the death receptor signal engager comprises one, two, or three TRAIL molecules (e.g., the death receptor signal engager is a monomeric, dimeric, or trimeric TRAIL molecule, respectively). In some embodiments, the death receptor signal engager comprises one, two, or three death receptor molecules (e.g., the death receptor signal engager is a monomeric, dimeric, or trimeric death receptor molecule, respectively). In some embodiments, the death receptor signal engager comprises one, two, or three antigen binding domains that specifically bind to a death receptor (e.g., to one or more death receptors, e.g., the same or different death receptors)

[0693] In some embodiments, the death receptor signal engager comprises an amino acid sequence selected from Table 11 A (or an amino acid sequence having at least about 77%, 80%, 85%, 90%, 95%, or 99% sequence identity to a sequence selected from Table 11A).

[0694] In some embodiments, the death receptor signal engager comprises an amino acid sequence of SEQ ID NO: 6157 (or an amino acid sequence having at least about 77%, 80%, 85%, 90%, 95%, or 99% sequence identity to SEQ ID NO: 6157).

[0695] In some embodiments, the death receptor signal engager comprises an amino acid sequence of SEQ ID NO: 6158 (or an amino acid sequence having at least about 77%, 80%, 85%, 90%, 95%, or 99% sequence identity to SEQ ID NO: 6158).

[0696] In some embodiments, the death receptor signal engager comprises an amino acid sequence of SEQ ID NO: 6159 (or an amino acid sequence having at least about 77%, 80%, 85%, 90%, 95%, or 99% sequence identity to SEQ ID NO: 6159).

[0697] In some embodiments, the death receptor signal engager comprises an amino acid sequence of SEQ ID NO: 6160 (or an amino acid sequence having at least about 77%, 80%, 85%, 90%, 95%, or 99% sequence identity to SEQ ID NO: 6160).

[0698] In some embodiments, the death receptor signal engager comprises an amino acid sequence of SEQ ID NO: 6161 (or an amino acid sequence having at least about 77%, 80%, 85%, 90%, 95%, or 99% sequence identity to SEQ ID NO: 6161).

[0699] In some embodiments, the death receptor signal engager comprises an amino acid sequence of SEQ ID NO: 6162 (or an amino acid sequence having at least about 77%, 80%, 85%, 90%, 95%, or 99% sequence identity to SEQ ID NO: 6162).

[0700] In some embodiments, the death receptor signal engager comprises an amino acid sequence of SEQ ID NO: 6163 (or an amino acid sequence having at least about 77%, 80%, 85%, 90%, 95%, or 99% sequence identity to SEQ ID NO: 6163).

[0701] In some embodiments, the death receptor signal engager comprises an amino acid sequence of SEQ ID NO: 6164 (or an amino acid sequence having at least about 77%, 80%, 85%, 90%, 95%, or 99% sequence identity to SEQ ID NO: 6164).

[0702] In some embodiments, the death receptor signal engager comprises an amino acid sequence of SEQ ID NO: 6165 (or an amino acid sequence having at least about 77%, 80%, 85%, 90%, 95%, or 99% sequence identity to SEQ ID NO: 6165).

[0703] In some embodiments, the death receptor signal engager is comprised on the same polypeptide chain as another component of a TCR targeting molecule of the present disclosure, e.g., the death receptor signal engager is comprised on the same polypeptide chain as a heavy and/or light chain of a first antigen binding domain that preferentially binds to a TCRBV antigen (e.g., a TCRBV antigen corresponding to a biased TCRBV clonotype) on a lymphocyte cell (e.g., T cell), an immune cell engager, a cytokine molecule, or a cytokine inhibitor molecule, e.g., as a fusion protein. In some embodiments, the TCR targeting molecule comprises a fusion protein comprising a death receptor signal engager and light chain of a first antigen binding domain that preferentially binds to a TCRBV antigen (e.g., a TCRBV antigen corresponding to a biased TCRBV clonotype). In some embodiments, the TCR targeting molecule comprises a fusion protein comprising a death receptor signal engager and a light chain of a first antigen binding domain that selectively targets lymphocytes expressing a TCRBV antigen (e.g., a TCRBV antigen corresponding to a biased TCRBV clonotype).

TABLE 11A
Exemplary death receptor signal engagers

| SEQ ID | | | |
|---|---|---|---|
| NO | ID Ref. | Description | Sequence |
| SEQ ID | monomeric_ | Monomeric | METDTLLLWVLLLWVPGSTGDYKDDDDKGGGGSGT |
| NO: 6157 | hTRAIL_ | human TRAIL | GGAAAHITGTRGRSNTLSSPNSKNEKALGRKINSWES |
| | aa122_281- | comprising | SRSGHSFLSNLHLRNGELVIHEKGFYYIYSQTYFRFQE |
| | hFc_Knob_ | residues 122- | EIKENTKNDKQMVQYIYKYTSYPDPILLMKSARNSC |
| | Cys- | 281 | WSKDAEYGLYSIYQGGIFELKENDRIFVSVTNEHLID |
| | Blank | | MDHEASFFGAFAVSGSGNGTSNGTSGSSGGDKTHTC |
| | | | PPCPAPELLGGPSVFLFPPKPKDTLMISRTPEVTCVVV |
| | | | DVSHEDPEVKFNWYVDGVEVHNAKTKPREEQYNST |
| | | | YRVVSVLTVLHQDWLNGKEYKCKVSNKALPAPIEKT |
| | | | ISKAKGQPREPQVYTLPPCREEMTKNQVSLWCLVKG |
| | | | FYPSDIAVEWESNGQPENNYKTTPPVLDSDGSFFLYS |
| | | | KLTVDKSRWQQGNVFSCSVMHEALHNHYTQKSLSLS |
| | | | PGK |
| SEQ ID | dimeric_ | Dimeric human | METDTLLLWVLLLWVPGSTGDYKDDDDKGGGGSGT |
| NO: 6158 | hTRAIL_ | TRAIL | GGAAAHITGTRGRSNTLSSPNSKNEKALGRKINSWES |
| | aa122_281- | comprising | SRSGHSFLSNLHLRNGELVIHEKGFYYIYSQTYFRFQE |
| | hFc_Knob_ | residues 122- | EIKENTKNDKQMVQYIYKYTSYPDPILLMKSARNSC |
| | Cys- | 281 | WSKDAEYGLYSIYQGGIFELKENDRIFVSVTNEHLID |
| | Blank | | MDHEASFFGAFAVSGAAAHITGTRGRSNTLSSPNSKN |
| | | | EKALGRKINSWESSRSGHSFLSNLHLRNGELVIHEKG |
| | | | FYYIYSQTYFRFQEEIKENTKNDKQMVQYIYKYTSYP |
| | | | DPILLMKSARNSCWSKDAEYGLYSIYQGGIFELKEND |
| | | | RIFVSVTNEHLIDMDHEASFFGAFAVSGSGNGTSNGT |
| | | | SGSSGGDKTHTCPPCPAPELLGGPSVFLFPPKPKDTLM |
| | | | ISRTPEVTCVVVDVSHEDPEVKFNWYVDGVEVHNAK |
| | | | TKPREEQYNSTYRVVSVLTVLHQDWLNGKEYKCKV |
| | | | SNKALPAPIEKTISKAKGQPREPQVYTLPPCREEMTKN |
| | | | QVSLWCLVKGFYPSDIAVEWESNGQPENNYKTTPPV |
| | | | LDSDGSFFLYSKLTVDKSRWQQGNVFSCSVMHEALH |
| | | | NHYTQKSLSLSPGK |
| SEQ ID | trimeric_ | Trimeric human | METDTLLLWVLLLWVPGSTGDYKDDDDKGGGGSGT |
| NO: 6159 | hTRAIL_ | TRAIL | GGAAAHITGTRGRSNTLSSPNSKNEKALGRKINSWES |
| | aa122_281- | comprising | SRSGHSFLSNLHLRNGELVIHEKGFYYIYSQTYFRFQE |
| | hFc_Knob_ | residues 122- | EIKENTKNDKQMVQYIYKYTSYPDPILLMKSARNSC |
| | Cys- | 281 | WSKDAEYGLYSIYQGGIFELKENDRIFVSVTNEHLID |
| | Blank | | MDHEASFFGAFAVSGAAAHITGTRGRSNTLSSPNSKN |
| | | | EKALGRKINSWESSRSGHSFLSNLHLRNGELVIHEKG |
| | | | FYYIYSQTYFRFQEEIKENTKNDKQMVQYIYKYTSYP |
| | | | DPILLMKSARNSCWSKDAEYGLYSIYQGGIFELKEND |
| | | | RIFVSVTNEHLIDMDHEASFFGAFAVSGAAAHITGTR |
| | | | GRSNTLSSPNSKNEKALGRKINSWESSRSGHSFLSNLH |
| | | | LRNGELVIHEKGFYYIYSQTYFRFQEEIKENTKNDKQ |
| | | | MVQYIYKYTSYPDPILLMKSARNSCWSKDAEYGLYSI |
| | | | YQGGIFELKENDRIFVSVTNEHLIDMDHEASFFGAFA |
| | | | VSGSGNGTSNGTSGSSGGDKTHTCPPCPAPELLGGPS |
| | | | VFLFPPKPKDTLMISRTPEVTCVVVDVSHEDPEVKFN |
| | | | WYVDGVEVHNAKTKPREEQYNSTYRVVSVLTVLHQ |
| | | | DWLNGKEYKCKVSNKALPAPIEKTISKAKGQPREPQ |
| | | | VYTLPPCREEMTKNQVSLWCLVKGFYPSDIAVEWES |
| | | | NGQPENNYKTTPPVLDSDGSFFLYSKLTVDKSRWQQ |
| | | | GNVFSCSVMHEALHNHYTQKSLSLSPGK |
| SEQ ID | monomeric_ | Monomeric | METDTLLLWVLLLWVPGSTGTSEETISTVQEKQQNIS |
| NO: 6160 | hTRAIL_ | human TRAIL | PLVRERGPQRVAAHITGTRGRSNTLSSPNSKNEKALG |
| | 95-281- | comprising | RKINSWESSRSGHSFLSNLHLRNGELVIHEKGFYYIYS |
| | hFc_Knob_ | residues 95-281 | QTYFRFQEEIKENTKNDKQMVQYIYKYTSYPDPILLM |
| | Cys- | | KSARNSCWSKDAEYGLYSIYQGGIFELKENDRIFVSV |
| | Blank | | TNEHLIDMDHEASFFGAFLVGGGGGSGGGGSDKTHT |
| | | | CPPCPAPELLGGPSVFLFPPKPKDTLMISRTPEVTCVV |
| | | | VDVSHEDPEVKFNWYVDGVEVHNAKTKPREEQYNS |
| | | | TYRVVSVLTVLHQDWLNGKEYKCKVSNKALPAPIEK |
| | | | TISKAKGQPREPQVYTLPPCREEMTKNQVSLWCLVK |
| | | | GFYPSDIAVEWESNGQPENNYKTTPPVLDSDGSFFLY |
| | | | SKLTVDKSRWQQGNVFSCSVMHEALHNHYTQKSLSL |
| | | | SPGK |
| SEQ ID | dimeric_ | Dimeric human | METDTLLLWVLLLWVPGSTGTSEETISTVQEKQQNIS |
| NO: 6161 | hTRAIL_ | TRAIL | PLVRERGPQRVAAHITGTRGRSNTLSSPNSKNEKALG |
| | 95-281- | comprising | RKINSWESSRSGHSFLSNLHLRNGELVIHEKGFYYIYS |
| | hFc_Knob_ | residues 95-281 | QTYFRFQEEIKENTKNDKQMVQYIYKYTSYPDPILLM |
| | Cys- | | KSARNSCWSKDAEYGLYSIYQGGIFELKENDRIFVSV |
| | Blank | | TNEHLIDMDHEASFFGAFLVGGGGGSGGGGSGTSEET |
| | | | ISTVQEKQQNISPLVRERGPQRVAAHITGTRGRSNTLS |
| | | | SPNSKNEKALGRKINSWESSRSGHSFLSNLHLRNGEL |
| | | | VIHEKGFYYIYSQTYFRFQEEIKENTKNDKQMVQYIY |
| | | | KYTSYPDPILLMKSARNSCWSKDAEYGLYSIYQGGIF |
| | | | ELKENDRIFVSVTNEHLIDMDHEASFFGAFLVGGGGG |
| | | | SGGGGSDKTHTCPPCPAPELLGGPSVFLFPPKPKDTL |
| | | | MISRTPEVTCVVVDVSHEDPEVKFNWYVDGVEVHN |
| | | | AKTKPREEQYNSTYRVVSVLTVLHQDWLNGKEYKC |
| | | | KVSNKALPAPIEKTISKAKGQPREPQVYTLPPCREEMT |
| | | | KNQVSLWCLVKGFYPSDIAVEWESNGQPENNYKTTP |
| | | | PVLDSDGSFFLYSKLTVDKSRWQQGNVFSCSVMHEA |
| | | | LHNHYTQKSLSLSPGK |
| SEQ ID | trimeric_ | Trimeric human | METDTLLLWVLLLWVPGSTGTSEETISTVQEKQQNIS |
| NO: 6162 | hTRAIL_ | TRAIL | PLVRERGPQRVAAHITGTRGRSNTLSSPNSKNEKALG |
| | 95-281- | comprising | RKINSWESSRSGHSFLSNLHLRNGELVIHEKGFYYIYS |
| | hFc_Knob_ | residues 95-281 | QTYFRFQEEIKENTKNDKQMVQYIYKYTSYPDPILLM |
| | Cys- | | KSARNSCWSKDAEYGLYSIYQGGIFELKENDRIFVSV |
| | Blank | | TNEHLIDMDHEASFFGAFLVGGGGGSGGGGSGTSEET |
| | | | ISTVQEKQQNISPLVRERGPQRVAAHITGTRGRSNTLS |
| | | | SPNSKNEKALGRKINSWESSRSGHSFLSNLHLRNGEL |
| | | | VIHEKGFYYIYSQTYFRFQEEIKENTKNDKQMVQYIY |
| | | | KYTSYPDPILLMKSARNSCWSKDAEYGLYSIYQGGIF |
| | | | ELKENDRIFVSVTNEHLIDMDHEASFFGAFLVGGGGG |
| | | | SGGGGSGTSEETISTVQEKQQNISPLVRERGPQRVAA |
| | | | HITGTRGRSNTLSSPNSKNEKALGRKINSWESSRSGHS |
| | | | FLSNLHLRNGELVIHEKGFYYIYSQTYFRFQEEIKENT |
| | | | KNDKQMVQYIYKYTSYPDPILLMKSARNSCWSKDAE |
| | | | YGLYSIYQGGIFELKENDRIFVSVTNEHLIDMDHEASF |
| | | | FGAFLVGGGGGSGGGGSDKTHTCPPCPAPELLGGPSV |
| | | | FLFPPKPKDTLMISRTPEVTCVVVDVSHEDPEVKFNW |
| | | | YVDGVEVHNAKTKPREEQYNSTYRVVSVLTVLHQD |
| | | | WLNGKEYKCKVSNKALPAPIEKTISKAKGQPREPQV |
| | | | YTLPPCREEMTKNQVSLWCLVKGFYPSDIAVEWESN |
| | | | GQPENNYKTTPPVLDSDGSFFLYSKLTVDKSRWQQG |
| | | | NVFSCSVMHEALHNHYTQKSLSLSPGK |
| SEQ ID | a_hDR5_ | Antigen binding | METDTLLLWVLLLWVPGSTGEVQLVESGGGLVQPG |
| NO: 6163 | Tigatuzumab_ | domain specific | GSLRLSCAASGFTFSSYVMSWVRQAPGKGLEWVATI |
| | scFv_ | to DR5, a.k.a. | SSGGSYTYYPDSVKGRFTISRDNAKNTLYLQMNSLRA |
| | VH_VL- | tigatuzumab | EDTAVYYCARRGDSMITTDYWGQGTLVTVSSGGGG |
| | hFc_Knob_ | | SGGGGSGGGGSGGGGSDIQMTQSPSSLSASVGDRVTI |
| | Cys- | | TCKASQDVGTAVAWYQQKPGKAPKLLIYWASTRHT |
| | Blank | | GVPSRFSGSGSGTDFTLTISSLQPEDFATYYCQQYSSY |
| | | | RTFGQGTKVEIKGGGGSGGGGSDKTHTCPPCPAPELL |
| | | | GGPSVFLFPPKPKDTLMISRTPEVTCVVVDVSHEDPE |
| | | | VKFNWYVDGVEVHNAKTKPREEQYNSTYRVVSVLT |
| | | | VLHQDWLNGKEYKCKVSNKALPAPIEKTISKAKGQP |
| | | | REPQVYTLPPCREEMTKNQVSLWCLVKGFYPSDIAVE |
| | | | WESNGQPENNYKTTPPVLDSDGSFFLYSKLTVDKSR |
| | | | WQQGNVFSCSVMHEALHNHYTQKSLSLSPGK |
| SEQ ID | a_hDR5_ | Antigen binding | METDTLLLWVLLLWVPGSTGEVQLVQSGGGVERPG |
| NO: 6164 | Drozitumab_ | domain specific | GSLRLSCAASGFTFDDYAMSWVRQAPGKGLEWVSGI |
| | scFv_ | to DR5, a.k.a. | NWQGGSTGYADSVKGRVTISRDNAKNSLYLQMNSL |
| | VH_VL- | drozitumab | RAEDTAVYYCAKILGAGRGWYFDYWGKGTTVTVSS |
| | hFc_Knob_ | | GGGGSGGGGSGGGGSGGGGSSELTQDPAVSVALGQT |
| | Cys | | VRITCSGDSLRSYYASWYQQKPGQAPVLVIYGANNR |
| | | | PSGIPDRFSGSSSGNTASLTITGAQAEDEADYYCNSAD |
| | | | SSGNHVVFGGGTKLTVLGGGGSGGGGSDKTHTCPPC |
| | | | PAPELLGGPSVFLFPPKPKDTLMISRTPEVTCVVVDVS |
| | | | HEDPEVKFNWYVDGVEVHNAKTKPREEQYNSTYRV |
| | | | VSVLTVLHQDWLNGKEYKCKVSNKALPAPIEKTISK |
| | | | AKGQPREPQVYTLPPCREEMTKNQVSLWCLVKGFYP |
| | | | SDIAVEWESNGQPENNYKTTPPVLDSDGSFFLYSKLT |
| | | | VDKSRWQQGNVFSCSVMHEALHNHYTQKSLSLSPG |
| | | | K |
| SEQ ID | a_hDR5_ | Antigen binding | METDTLLLWVLLLWVPGSTGQVQLQESGPGLVKPSQ |
| NO: 6165 | Conatumumab_ | domain specific | TLSLTCTVSGGSISSGDYFWSWIRQLPGKGLEWIGHIH |
| | scFv_VH_ | to DR5, a.k.a. | NSGTTYYNPSLKSRVTISVDTSKKQFSLRLSSVTAADT |
| | VL- | conatumumab | AVYYCARDRGGDYYYGMDVWGQGTTVTVSSGGGG |
| | hFc_Knob_ | | SGGGGSGGGGSGGGGSEIVLTQSPGTLSLSPGERATLS |
| | Cys | | CRASQGISRSYLAWYQQKPGQAPSLLIYGASSRATGIP |
| | | | DRFSGSGSGTDFTLTISRLEPEDFAVYYCQQFGSSPWT |
| | | | FGQGTKVEIKRGGGGSGGGGSDKTHTCPPCPAPELLG |
| | | | GPSVFLFPPKPKDTLMISRTPEVTCVVVDVSHEDPEV |
| | | | KFNWYVDGVEVHNAKTKPREEQYNSTYRVVSVLTV |
| | | | LHQDWLNGKEYKCKVSNKALPAPIEKTISKAKGQPR |
| | | | EPQVYTLPPCREEMTKNQVSLWCLVKGFYPSDIAVE |
| | | | WESNGQPENNYKTTPPVLDSDGSFFLYSKLTVDKSR |
| | | | WQQGNVFSCSVMHEALHNHYTQKSLSLSPGK |

### T Cell Engagers

[0704] The present disclosure provides, inter alia, TCR targeting molecules, that are engineered to further contain one or more T cell engager that mediate binding to and/or activation of a T cell. Accordingly, in some embodiments, the T cell engager is selected from an antigen binding domain or ligand that binds to (e.g., and in some embodiments activates) one or more of CD3, TCRα, TCRβ, TCRγ, TCRζ, ICOS, CD28, CD27, HVEM, LIGHT, CD40, 4-1BB, OX40, DR3, GITR, CD30, TIM1, SLAM, CD2, or CD226. In other embodiments, the T cell engager is selected from an antigen binding domain or ligand that binds to and does not activate one or more of CD3, TCRα, TCRβ, TCRγ, TCRζ, ICOS, CD28, CD27, HVEM, LIGHT, CD40, 4-1BB, OX40, DR3, GITR, CD30, TIM1, SLAM, CD2, or CD226.

[0705] T cells remain an important arm of immunity against infection and disease. As used herein, the term “effector T cell” includes T helper (e.g., CD4+) cells and cytotoxic (e.g., CD8+) T cells. CD4+ effector T cells contribute to the development of several immunologic processes, including maturation of B cells into plasma cells and memory B cells, and activation of cytotoxic T cells and macrophages. CD8+ effector T cells destroy virus-infected cells, tumor cells, and other pathogenic cells. T cell markers or regions can be exploited to harness T cell functions to target, inhibit, and/or kill target cells in a subject in need thereof. These markers can include, but are not limited to, CD3, TCRα, TCRγ, TCRζ, ICOS, CD28, CD27, HVEM, LIGHT, CD40, 4-1BB, OX40, DR3, GITR, CD30, TIM1, SLAM, CD2, CD154, CD134, KIR, or CD226. Without wishing to be bound by theory, molecules targeting markers for activating or stimulating T cell activity may be used to kill autoreactive T cells in autoimmune diseases or disorders. Described herein are molecules targeting the TCRαV and/or TCRβV chain of an autoreactive T cell and also containing a T cell engager that binds to one or more of a marker on a healthy, e.g. not autoreactive T cell, including, but not limited to, CD3, TCRα, TCRγ, TCRζ, ICOS, CD28, CD27, HVEM, LIGHT, CD40, 4-1BB, OX40, DR3, GITR, CD30, TIM1, SLAM, CD2, CD154, CD134, KIR, or CD226. Without wishing to be bound by any particular theory, activation of the healthy, e.g. not autoreactive T cell, by binding of the agent, antibody molecule, multispecific molecule, multifunctional molecule, and/or TCR targeting molecule described herein may mediate inhibition or killing of the autoreactive T cell.

[0706] Disclosed herein are, inter alia, multispecific (e.g., bi-, tri-, quad-specific) or multifunctional molecules that are engineered to further contain one or more T cell engager that mediate binding to and/or activation of a T cell. In some embodiments, the T cell engager is an antigen binding domain that binds to, e.g., activates TCRβ, e.g., a TCRβV region, as described herein. In some embodiments, the T cell engager is selected from an antigen binding domain or ligand that binds to (e.g., and in some embodiments activates) one or more of CD3, TCRα, TCRγ, TCRζ, ICOS, CD28, CD27, HVEM, LIGHT, CD40, 4-1BB, OX40, DR3, GITR, CD30, TIM1, SLAM, CD2, CD154, CD134, KIR, or CD226. In other embodiments, the T cell engager is selected from an antigen binding domain or ligand that binds to and does not activate one or more of CD3, TCRα, TCRγ, TCRζ, ICOS, CD28, CD27, HVEM, LIGHT, CD40, 4-1BB, OX40, DR3, GITR, CD30, TIM1, SLAM, CD2, CD154, CD134, KIR, or CD226.

[0707] Disclosed herein are, inter alia, multispecific (e.g., bi-, tri-, quad-specific) or multifunctional molecules that are engineered to further contain one or more T cell engager that mediate binding to and/or activation of a T cell. In some embodiments, the T cell engager is an antigen binding domain that binds to, e.g., activates TCRα, e.g., a TCRαV region, as described herein. In some embodiments, the T cell engager is selected from an antigen binding domain or ligand that binds to (e.g., and in some embodiments activates) one or more of CD3, TCRα, TCRγ, TCRζ, ICOS, CD28, CD27, HVEM, LIGHT, CD40, 4-1BB, OX40, DR3, GITR, CD30, TIM1, SLAM, CD2, CD154, CD134, KIR, or CD226. In other embodiments, the T cell engager is selected from an antigen binding domain or ligand that binds to and does not activate one or more of CD3, TCRα, TCRγ, TCRζ, ICOS, CD28, CD27, HVEM, LIGHT, CD40, 4-1BB, OX40, DR3, GITR, CD30, TIM1, SLAM, CD2, CD154, CD134, KIR, or CD226.

[0708] Disclosed herein are methods of inhibiting or preventing the activation and/or expansion of autoreactive T cells in a subject comprising administering a multispecific molecule comprising an antigen binding domain that binds to TCRVα and a T cell engager. In some embodiments, the T cell engager is selected from an antigen binding domain or ligand that binds to (e.g., and in some embodiments activates) one or more of CD3, TCRα, TCRγ, TCRζ, ICOS, CD28, CD27, HVEM, LIGHT, CD40, 4-1BB, OX40, DR3, GITR, CD30, TIM1, SLAM, CD2, CD154, CD134, KIR, or CD226. In some embodiments, the T cell engager binds to (e.g. activates) a CD4+ and/or a CD8+ T cell. In some embodiments, the T cell engager binds to (e.g. activates) a CD4+ T cell. In some embodiments, the T cell engager binds to (e.g. activates) a CD8+ T cell. In some embodiments, the subject has an autoimmune disease.

[0709] Disclosed herein are methods of inhibiting or preventing the activation and/or expansion of autoreactive T cells in a subject comprising administering a multispecific molecule comprising an antigen binding domain that binds to TCRVβ and a T cell engager. In some embodiments, the T cell engager is selected from an antigen binding domain or ligand that binds to (e.g., and in some embodiments activates) one or more of CD3, TCRα, TCRγ, TCRζ, ICOS, CD28, CD27, HVEM, LIGHT, CD40, 4-1BB, OX40, DR3, GITR, CD30, TIM1, SLAM, CD2, CD154, CD134, KIR, or CD226. In some embodiments, the T cell engager binds to (e.g. activates) a CD4+ and/or a CD8+ T cell. In some embodiments, the T cell engager binds to (e.g. activates) a CD4+ T cell. In some embodiments, the T cell engager binds to (e.g. activates) a CD8+ T cell. In some embodiments, the subject has an autoimmune disease.

[0710] Disclosed herein are methods of reducing or depleting autoreactive T cells in a subject comprising administering a multispecific molecule comprising an antigen binding domain that binds to TCRVα and a T cell engager. In some embodiments, the T cell engager is selected from an antigen binding domain or ligand that binds to (e.g., and in some embodiments activates) one or more of CD3, TCRα, TCRβ, TCRγ, TCRζ, ICOS, CD28, CD27, HVEM, LIGHT, CD40, 4-1BB, OX40, DR3, GITR, CD30, TIM1, SLAM, CD2, or CD226. In some embodiments, the T cell engager binds to (e.g. activates) a CD4+ and/or a CD8+ T cell. In some embodiments, the T cell engager binds to (e.g. activates) a CD4+ T cell. In some embodiments, the T cell engager binds to (e.g. activates) a CD8+ T cell. In some embodiments, the subject has an autoimmune disease.

[0711] Disclosed herein are methods of reducing or depleting autoreactive T cells in a subject comprising administering a multispecific molecule comprising an antigen binding domain that binds to TCRVβ and a T cell engager. In some embodiments, the T cell engager is selected from an antigen binding domain or ligand that binds to (e.g., and in some embodiments activates) one or more of CD3, TCRα, TCRβ, TCRγ, TCRζ, ICOS, CD28, CD27, HVEM, LIGHT, CD40, 4-1BB, OX40, DR3, GITR, CD30, TIM1, SLAM, CD2, or CD226. In some embodiments, the T cell engager binds to (e.g. activates) a CD4+ and/or a CD8+ T cell. In some embodiments, the T cell engager binds to (e.g. activates) a CD4+ T cell. In some embodiments, the T cell engager binds to (e.g. activates) a CD8+ T cell. In some embodiments, the subject has an autoimmune disease.

### B Cell, Macrophage & Dendritic Cell Engagers

[0712] Broadly, B cells, also known as B lymphocytes, are a type of white blood cell of the lymphocyte subtype. They function in the humoral immunity component of the adaptive immune system by secreting antibodies. Additionally, B cells present antigen (they are also classified as professional antigen-presenting cells (APCs)) and secrete cytokines. Macrophages are a type of white blood cell that engulfs and digests cellular debris, foreign substances, microbes, cancer cells via phagocytosis. Besides phagocytosis, they play important roles in nonspecific defense (innate immunity) and also help initiate specific defense mechanisms (adaptive immunity) by recruiting other immune cells such as lymphocytes. For example, they are important as antigen presenters to T cells. Beyond increasing inflammation and stimulating the immune system, macrophages also play an important anti-inflammatory role and can decrease immune reactions through the release of cytokines. Dendritic cells (DCs) are antigen-presenting cells that function in processing antigen material and present it on the cell surface to the T cells of the immune system.

[0713] The present disclosure provides, inter alia, TCR targeting molecules that include, e.g., are engineered to contain, one or more B cell, macrophage, and/or dendritic cell engager that mediate binding to and/or activation of a B cell, macrophage, and/or dendritic cell.

[0714] Accordingly, in some embodiments, the immune cell engager comprises a B cell, macrophage, and/or dendritic cell engager chosen from one or more of CD40 ligand (CD40L) or a CD70 ligand; an antibody molecule that binds to CD40 or CD70; an antibody molecule to OX40; an OX40 ligand (OX40L); an agonist of a Toll-like receptor (e.g., as described herein, e.g., a TLR4, e.g., a constitutively active TLR4 (caTLR4), or a TLR9 agonists); a 41BB; a CD2; a CD47; or a STING agonist, or a combination thereof.

[0715] Disclosed herein are methods of inhibiting or preventing the activation and/or expansion of autoreactive T cells in a subject comprising administering a multispecific molecule comprising an antigen binding domain that binds to TCRVβ and a B cell engager, a macrophage engager, or a dendritic cell engager. In some embodiments, the subject has an autoimmune disease.

[0716] Disclosed herein are methods of reducing or depleting autoreactive T cells in a subject comprising administering a multispecific molecule comprising an antigen binding domain that binds to TCRVα and a B cell engager, a macrophage engager, or a dendritic cell engager. In some embodiments, the subject has an autoimmune disease.

[0717] In some embodiments, the B cell engager is a CD40L, an OX40L, or a CD70 ligand, or an antibody molecule that binds to OX40, CD40 or CD70.

[0718] In some embodiments, the macrophage engager is a CD2 agonist. In some embodiments, the macrophage engager is an antigen binding domain that binds to: CD40L or antigen binding domain or ligand that binds CD40, a Toll like receptor (TLR) agonist (e.g., as described herein), e.g., a TLR9 or TLR4 (e.g., caTLR4 (constitutively active TLR4), CD47, or a STING agonist. In some embodiments, the STING agonist is a cyclic dinucleotide, e.g., cyclic di-GMP (cdGMP) or cyclic di-AMP (cdAMP). In some embodiments, the STING agonist is biotinylated.

[0719] In some embodiments, the dendritic cell engager is a CD2 agonist. In some embodiments, the dendritic cell engager is a ligand, a receptor agonist, or an antibody molecule that binds to one or more of: OX40L, 41BB, a TLR agonist (e.g., as described herein) (e.g., TLR9 agonist, TLR4 (e.g., caTLR4 (constitutively active TLR4)), CD47, or and a STING agonist. In some embodiments, the STING agonist is a cyclic dinucleotide, e.g., cyclic di-GMP (cdGMP) or cyclic di-AMP (cdAMP). In some embodiments, the STING agonist is biotinylated.

[0720] In other embodiments, the immune cell engager mediates binding to, or activation of, one or more of a B cell, a macrophage, and/or a dendritic cell. Exemplary B cell, macrophage, and/or dendritic cell engagers can be chosen from one or more of CD40 ligand (CD40L) or a CD70 ligand; an antibody molecule that binds to CD40 or CD70; an antibody molecule to OX40; an OX40 ligand (OX40L); a Toll-like receptor agonist (e.g., a TLR4, e.g., a constitutively active TLR4 (caTLR4) or a TLR9 agonist); a 41BB agonist; a CD2; a CD47; or a STING agonist, or a combination thereof.

[0721] In some embodiments, the B cell engager is chosen from one or more of a CD40L, an OX40L, or a CD70 ligand, or an antibody molecule that binds to OX40, CD40 or CD70.

[0722] In other embodiments, the macrophage cell engager is chosen from one or more of a CD2 agonist; a CD40L; an OX40L; an antibody molecule that binds to OX40, CD40 or CD70; a Toll-like receptor agonist or a fragment thereof (e.g., a TLR4, e.g., a constitutively active TLR4 (caTLR4)); a CD47 agonist; or a STING agonist.

[0723] In other embodiments, the dendritic cell engager is chosen from one or more of a CD2 agonist, an OX40 antibody, an OX40L, 41BB agonist, a Toll-like receptor agonist or a fragment thereof (e.g., a TLR4, e.g., a constitutively active TLR4 (caTLR4)), CD47 agonist, or a STING agonist.

[0724] In one embodiment, the OX40L comprises the amino acid sequence: QVSHRYPRIQSIKVQFTEYKKEKGFILTSQKEDEIMKVQNNSVIINCDGFYLISLKGYFSQEVNISL HYQKDEEPLFQLKKVRSVNSLMVASLTYKDKVYLNVTTDNTSLDDFHVNGGELILIHQNPGEFC VL (SEQ ID NO: 7245), a fragment thereof, or an amino acid sequence substantially identical thereto (e.g., 95% to 99.9% identical thereto, or having at least one amino acid alteration, but not more than five, ten or fifteen alterations (e.g., substitutions, deletions, or insertions, e.g., conservative substitutions) to the amino acid sequence of SEQ ID NO: 7245.

[0725] In another embodiment, the CD40L comprises the amino acid sequence: MQKGDQNPQIAAHVISEASSKTTSVLQWAEKGYYTMSNNLVTLENGKQLTVKRQGLYYIYAQV TFCSNREASSQAPFIASLCLKSPGRFERILLRAANTHSSAKPCGQQSIHLGGVFELQPGASVFVNVT DPSQVSHGTGFTSFGLLKL (SEQ ID NO: 7246), a fragment thereof, or an amino acid sequence substantially identical thereto (e.g., 95% to 99.9% identical thereto, or having at least one amino acid alteration, but not more than five, ten or fifteen alterations (e.g., substitutions, deletions, or insertions, e.g., conservative substitutions) to the amino acid sequence of SEQ ID NO: 7246.

[0726] In yet other embodiments, the STING agonist comprises a cyclic dinucleotide, e.g., a cyclic di-GMP (cdGMP), a cyclic di-AMP (cdAMP), or a combination thereof, optionally with 2′,5′ or 3′,5′ phosphate linkages.

[0727] In one embodiment, the immune cell engager includes 41BB ligand, e.g., comprising the amino acid sequence: ACPWAVSGARASPGSAASPRLREGPELSPDDPAGLLDLRQGMFAQLVAQNVLLIDGPLSWYSDP GLAGVSLTGGLSYKEDTKELVVAKAGVYYVFFQLELRRVVAGEGSGSVSLALHLQPLRSAAGA AALALTVDLPPASSEARNSAFGFQGRLLHLSAGQRLGVHLHTEARARHAWQLTQGATVLGLFR VTPEIPAGLPSPRSE (SEQ ID NO: 7247), a fragment thereof, or an amino acid sequence substantially identical thereto (e.g., 95% to 99.9% identical thereto, or having at least one amino acid alteration, but not more than five, ten or fifteen alterations (e.g., substitutions, deletions, or insertions, e.g., conservative substitutions) to the amino acid sequence of SEQ ID NO: 7247.

### Linkers

[0728] The TCR targeting molecule disclosed herein can further include a linker, e.g., a linker between one or more of: the antigen binding domain and the cytokine molecule, the antigen binding domain and the immune cell engager, the antigen binding domain and the stromal modifying moiety, the cytokine molecule and the immune cell engager, the cytokine molecule and the stromal modifying moiety, the immune cell engager and the stromal modifying moiety, the antigen binding domain and the immunoglobulin chain constant region, the cytokine molecule and the immunoglobulin chain constant region, the immune cell engager and the immunoglobulin chain constant region, or the stromal modifying moiety and the immunoglobulin chain constant region. In embodiments, the linker is chosen from: a cleavable linker, a non-cleavable linker, a peptide linker, a flexible linker, a rigid linker, a helical linker, or a non-helical linker, or a combination thereof.

[0729] In one embodiment, the TCR targeting molecule can include one, two, three or four linkers, e.g., a peptide linker. In one embodiment, the peptide linker includes Gly and Ser. In some embodiments, the peptide linker is selected from GGGGS (SEQ ID NO: 7248); GGGGSGGGGS (SEQ ID NO: 7249); GGGGSGGGGSGGGGS (SEQ ID NO: 7250); and DVPSGPGGGGGSGGGGS (SEQ ID NO: 7251). In some embodiments, the peptide linker is a A(EAAAK)nA (SEQ ID NO: 7291) family of linkers (e.g., as described in Protein Eng. (2001) 14 (8): 529-532). These are stiff helical linkers with n ranging from 2-5. In some embodiments, the peptide linker is selected from AEAAAKEAAAKAAA (SEQ ID NO: 7252); AEAAAKEAAAKEAAAKAAA (SEQ ID NO: 7253); AEAAAKEAAAKEAAAKEAAAKAAA (SEQ ID NO: 77); and AEAAAKEAAAKEAAAKEAAAKEAAAKAAA(SEQ ID NO: 78).

### Nucleic Acids

[0730] Nucleic acids encoding the aforementioned TCR targeting molecules are also disclosed.

[0731] In certain embodiments, the invention features nucleic acids comprising nucleotide sequences that encode heavy and light chain variable regions and CDRs or hypervariable loops of the antibody molecules, as described herein. For example, the invention features a first and second nucleic acid encoding heavy and light chain variable regions, respectively, of an antibody molecule chosen from one or more of the antibody molecules disclosed herein. The nucleic acid can comprise a nucleotide sequence as set forth in the tables herein, or a sequence substantially identical thereto (e.g., a sequence at least about 85%, 90%, 95%, 99% or more identical thereto, or which differs by no more than 3, 6, 15, 30, or 45 nucleotides from the sequences shown in the tables herein.

[0732] In certain embodiments, the nucleic acid can comprise a nucleotide sequence encoding at least one, two, or three CDRs or hypervariable loops from a heavy chain variable region having an amino acid sequence as set forth in the tables herein, or a sequence substantially homologous thereto (e.g., a sequence at least about 85%, 90%, 95%, 99% or more identical thereto, and/or having one or more substitutions, e.g., conserved substitutions). In other embodiments, the nucleic acid can comprise a nucleotide sequence encoding at least one, two, or three CDRs or hypervariable loops from a light chain variable region having an amino acid sequence as set forth in the tables herein, or a sequence substantially homologous thereto (e.g., a sequence at least about 85%, 90%, 95%, 99% or more identical thereto, and/or having one or more substitutions, e.g., conserved substitutions). In yet another embodiment, the nucleic acid can comprise a nucleotide sequence encoding at least one, two, three, four, five, or six CDRs or hypervariable loops from heavy and light chain variable regions having an amino acid sequence as set forth in the tables herein, or a sequence substantially homologous thereto (e.g., a sequence at least about 85%, 90%, 95%, 99% or more identical thereto, and/or having one or more substitutions, e.g., conserved substitutions).

[0733] In certain embodiments, the nucleic acid can comprise a nucleotide sequence encoding at least one, two, or three CDRs or hypervariable loops from a heavy chain variable region having the nucleotide sequence as set forth in the tables herein, a sequence substantially homologous thereto (e.g., a sequence at least about 85%, 90%, 95%, 99% or more identical thereto, and/or capable of hybridizing under the stringency conditions described herein). In another embodiment, the nucleic acid can comprise a nucleotide sequence encoding at least one, two, or three CDRs or hypervariable loops from a light chain variable region having the nucleotide sequence as set forth in the tables herein, or a sequence substantially homologous thereto (e.g., a sequence at least about 85%, 90%, 95%, 99% or more identical thereto, and/or capable of hybridizing under the stringency conditions described herein). In yet another embodiment, the nucleic acid can comprise a nucleotide sequence encoding at least one, two, three, four, five, or six CDRs or hypervariable loops from heavy and light chain variable regions having the nucleotide sequence as set forth in the tables herein, or a sequence substantially homologous thereto (e.g., a sequence at least about 85%, 90%, 95%, 99% or more identical thereto, and/or capable of hybridizing under the stringency conditions described herein).

[0734] In certain embodiments, the nucleic acid can comprise a nucleotide sequence encoding a cytokine molecule, an immune cell engager, or a stromal modifying moiety disclosed herein.

[0735] In another aspect, the application features host cells and vectors containing the nucleic acids described herein. The nucleic acids may be present in a single vector or separate vectors present in the same host cell or separate host cell, as described in more detail hereinbelow.

### Vectors

[0736] Further provided herein are vectors comprising the nucleotide sequences encoding a TCR targeting molecule described herein. In one embodiment, the vectors comprise nucleotides encoding a TCR targeting molecule described herein. In one embodiment, the vectors comprise the nucleotide sequences described herein. The vectors include, but are not limited to, a virus, plasmid, cosmid, lambda phage or a yeast artificial chromosome (YAC).

[0737] Numerous vector systems can be employed. For example, one class of vectors utilizes DNA elements which are derived from animal viruses such as, for example, bovine papilloma virus, polyoma virus, adenovirus, vaccinia virus, baculovirus, retroviruses (Rous Sarcoma Virus, MMTV or MOMLV) or SV40 virus. Another class of vectors utilizes RNA elements derived from RNA viruses such as Semliki Forest virus, Eastern Equine Encephalitis virus and Flaviviruses.

[0738] Additionally, cells which have stably integrated the DNA into their chromosomes may be selected by introducing one or more markers which allow for the selection of transfected host cells. The marker may provide, for example, prototropy to an auxotrophic host, biocide resistance (e.g., antibiotics), or resistance to heavy metals such as copper, or the like. The selectable marker gene can be either directly linked to the DNA sequences to be expressed, or introduced into the same cell by cotransformation. Additional elements may also be needed for optimal synthesis of mRNA. These elements may include splice signals, as well as transcriptional promoters, enhancers, and termination signals.

[0739] Once the expression vector or DNA sequence containing the constructs has been prepared for expression, the expression vectors may be transfected or introduced into an appropriate host cell. Various techniques may be employed to achieve this, such as, for example, protoplast fusion, calcium phosphate precipitation, electroporation, retroviral transduction, viral transfection, gene gun, lipid based transfection or other conventional techniques. In the case of protoplast fusion, the cells are grown in media and screened for the appropriate activity.

[0740] Methods and conditions for culturing the resulting transfected cells and for recovering the antibody molecule produced are known to those skilled in the art, and may be varied or optimized depending upon the specific expression vector and mammalian host cell employed, based upon the present description.

### Cells

[0741] In another aspect, the application features host cells and vectors containing the nucleic acids described herein. The nucleic acids may be present in a single vector or separate vectors present in the same host cell or separate host cell. The host cell can be a eukaryotic cell, e.g., a mammalian cell, an insect cell, a yeast cell, or a prokaryotic cell, e.g., E. coli. For example, the mammalian cell can be a cultured cell or a cell line. Exemplary mammalian cells include lymphocytic cell lines (e.g., NSO), Chinese hamster ovary cells (CHO), COS cells, oocyte cells, and cells from a transgenic animal, e.g., mammary epithelial cell.

[0742] The invention also provides host cells comprising a nucleic acid encoding an antibody molecule as described herein.

[0743] In one embodiment, the host cells are genetically engineered to comprise nucleic acids encoding the antibody molecule.

[0744] In one embodiment, the host cells are genetically engineered by using an expression cassette. The phrase “expression cassette,” refers to nucleotide sequences, which are capable of affecting expression of a gene in hosts compatible with such sequences. Such cassettes may include a promoter, an open reading frame with or without introns, and a termination signal. Additional factors necessary or helpful in effecting expression may also be used, such as, for example, an inducible promoter.

[0745] The invention also provides host cells comprising the vectors described herein.

[0746] The cell can be, but is not limited to, a eukaryotic cell, a bacterial cell, an insect cell, or a human cell. Suitable eukaryotic cells include, but are not limited to, Vero cells, HeLa cells, COS cells, CHO cells, HEK293 cells, BHK cells and MDCKII cells. Suitable insect cells include, but are not limited to, Sf9 cells.

### Exemplary Multifunctional Polypeptide Molecule

[0747] Any of the compositions and methods described herein can be used to expand an immune cell population. An immune cell provided herein includes an immune cell derived from a hematopoietic stem cell or an immune cell derived from a non-hematopoietic stem cell, e.g., by differentiation or de-differentiation.

[0748] In some embodiments, the multifunctional polypeptide molecule comprises: (i) a first polypeptide comprising a sequence having at least 50%, 55%, 60%, 65%, 70%, 75%, 80%, 85%, 90%, 95%, 97%, 98%, 99%, 99.5%, 99.6%, 99.7%, 99.8%, or 99.9% sequence identity to the sequence of SEQ ID NO: 1346, and a sequence having at least 50%, 55%, 60%, 65%, 70%, 75%, 80%, 85%, 90%, 95%, 97%, 98%, 99%, 99.5%, 99.6%, 99.7%, 99.8%, or 99.9% sequence identity to the sequence of SEQ ID NO: 3649; (ii) a second polypeptide comprising a sequence having at least 50%, 55%, 60%, 65%, 70%, 75%, 80%, 85%, 90%, 95%, 97%, 98%, 99%, 99.5%, 99.6%, 99.7%, 99.8%, or 99.9% sequence identity to the sequence of SEQ ID NO: 3523, a sequence having at least 50%, 55%, 60%, 65%, 70%, 75%, 80%, 85%, 90%, 95%, 97%, 98%, 99%, 99.5%, 99.6%, 99.7%, 99.8%, or 99.9% sequence identity to the sequence of SEQ ID NO: 2170, and a sequence having at least 50%, 55%, 60%, 65%, 70%, 75%, 80%, 85%, 90%, 95%, 97%, 98%, 99%, 99.5%, 99.6%, 99.7%, 99.8%, or 99.9% sequence identity to the sequence of SEQ ID NO: 3648; and (iii) a third polypeptide comprising a sequence having at least 50%, 55%, 60%, 65%, 70%, 75%, 80%, 85%, 90%, 95%, 97%, 98%, 99%, 99.5%, 99.6%, 99.7%, 99.8%, or 99.9% sequence identity to the sequence of SEQ ID NO: 1349, and a sequence having at least 50%, 55%, 60%, 65%, 70%, 75%, 80%, 85%, 90%, 95%, 97%, 98%, 99%, 99.5%, 99.6%, 99.7%, 99.8%, or 99.9% sequence identity to the sequence of SEQ ID NO: 3644.

[0749] In some embodiments, the multifunctional polypeptide molecule comprises: (i) a first polypeptide comprising the sequence of SEQ ID NO: 1346, and the sequence of SEQ ID NO: 3649; (ii) a second polypeptide comprising the sequence of SEQ ID NO: 3523, the sequence of SEQ ID NO: 2170, and the sequence of SEQ ID NO: 3648; and (iii) a third polypeptide comprising the sequence of SEQ ID NO: 1349, and the sequence of SEQ ID NO: 3644.

[0750] In some embodiments, the multifunctional polypeptide molecule comprises: (i) a first polypeptide comprising, from the N-terminus to the C-terminus, a sequence having at least 50%, 55%, 60%, 65%, 70%, 75%, 80%, 85%, 90%, 95%, 97%, 98%, 99%, 99.5%, 99.6%, 99.7%, 99.8%, or 99.9% sequence identity to the sequence of SEQ ID NO: 1346 operatively linked to a sequence having at least 50%, 55%, 60%, 65%, 70%, 75%, 80%, 85%, 90%, 95%, 97%, 98%, 99%, 99.5%, 99.6%, 99.7%, 99.8%, or 99.9% sequence identity to the sequence of SEQ ID NO: 3649; (ii) a second polypeptide comprising, from the N-terminus to the C-terminus, a sequence having at least 50%, 55%, 60%, 65%, 70%, 75%, 80%, 85%, 90%, 95%, 97%, 98%, 99%, 99.5%, 99.6%, 99.7%, 99.8%, or 99.9% sequence identity to the sequence of SEQ ID NO: 3523 operatively linked to a sequence having at least 50%, 55%, 60%, 65%, 70%, 75%, 80%, 85%, 90%, 95%, 97%, 98%, 99%, 99.5%, 99.6%, 99.7%, 99.8%, or 99.9% sequence identity to the sequence of SEQ ID NO: 2170 operatively linked to a sequence having at least 50%, 55%, 60%, 65%, 70%, 75%, 80%, 85%, 90%, 95%, 97%, 98%, 99%, 99.5%, 99.6%, 99.7%, 99.8%, or 99.9% sequence identity to the sequence of SEQ ID NO: 3648; and (iii) a third polypeptide comprising, from the N-terminus to the C-terminus, a sequence having at least 50%, 55%, 60%, 65%, 70%, 75%, 80%, 85%, 90%, 95%, 97%, 98%, 99%, 99.5%, 99.6%, 99.7%, 99.8%, or 99.9% sequence identity to the sequence of SEQ ID NO: 1349 operatively linked to a sequence having at least 50%, 55%, 60%, 65%, 70%, 75%, 80%, 85%, 90%, 95%, 97%, 98%, 99%, 99.5%, 99.6%, 99.7%, 99.8%, or 99.9% sequence identity to the sequence of SEQ ID NO: 3644.

[0751] In some embodiments, the multifunctional polypeptide molecule comprises: (i) a first polypeptide comprising, from the N-terminus to the C-terminus, the sequence of SEQ ID NO: 1346 operatively linked to the sequence of SEQ ID NO: 3649; (ii) a second polypeptide comprising, from the N-terminus to the C-terminus, the sequence of SEQ ID NO: 3523 operatively linked to the sequence of SEQ ID NO: 2170 operatively linked to the sequence of SEQ ID NO: 3648; and (iii) a third polypeptide comprising, from the N-terminus to the C-terminus, the sequence of SEQ ID NO: 1349 operatively linked to the sequence of SEQ ID NO: 3644.

[0752] In some embodiments, a sequence having at least 50%, 55%, 60%, 65%, 70%, 75%, 80%, 85%, 90%, 95%, 97%, 98%, 99%, 99.5%, 99.6%, 99.7%, 99.8%, or 99.9% sequence identity to the sequence of SEQ ID NO: 3523 is operatively linked to a sequence having at least 50%, 55%, 60%, 65%, 70%, 75%, 80%, 85%, 90%, 95%, 97%, 98%, 99%, 99.5%, 99.6%, 99.7%, 99.8%, or 99.9% sequence identity to the sequence of SEQ ID NO: 2170 via a sequence having at least 50%, 55%, 60%, 65%, 70%, 75%, 80%, 85%, 90%, 95%, 97%, 98%, 99%, 99.5%, 99.6%, 99.7%, 99.8%, or 99.9% sequence identity to the sequence of SEQ ID NO: 3524, a sequence having at least 50%, 55%, 60%, 65%, 70%, 75%, 80%, 85%, 90%, 95%, 97%, 98%, 99%, 99.5%, 99.6%, 99.7%, 99.8%, or 99.9% sequence identity to the sequence of SEQ ID NO: 2170 is operatively linked to a sequence having at least 50%, 55%, 60%, 65%, 70%, 75%, 80%, 85%, 90%, 95%, 97%, 98%, 99%, 99.5%, 99.6%, 99.7%, 99.8%, or 99.9% sequence identity to the sequence of SEQ ID NO: 3648 via a sequence having at least 50%, 55%, 60%, 65%, 70%, 75%, 80%, 85%, 90%, 95%, 97%, 98%, 99%, 99.5%, 99.6%, 99.7%, 99.8%, or 99.9% sequence identity to the sequence of SEQ ID NO: 3308, or a combination thereof.

[0753] In some embodiments, the sequence of SEQ ID NO: 3523 is operatively linked to the sequence of SEQ ID NO: 2170 via the sequence of SEQ ID NO: 3524, the sequence of SEQ ID NO: 2170 is operatively linked to the sequence of SEQ ID NO: 3648 via the sequence of SEQ ID NO: 3308, or a combination thereof.

[0754] In some embodiments, the multifunctional polypeptide molecule comprises: (i) a first polypeptide comprising a sequence having at least 50%, 55%, 60%, 65%, 70%, 75%, 80%, 85%, 90%, 95%, 97%, 98%, 99%, 99.5%, 99.6%, 99.7%, 99.8%, or 99.9% sequence identity to the sequence of SEQ ID NO: 3517; (ii) a second polypeptide comprising a sequence having at least 50%, 55%, 60%, 65%, 70%, 75%, 80%, 85%, 90%, 95%, 97%, 98%, 99%, 99.5%, 99.6%, 99.7%, 99.8%, or 99.9% sequence identity to the sequence of SEQ ID NO: 3519; and (iii) a third polypeptide comprising a sequence having at least 50%, 55%, 60%, 65%, 70%, 75%, 80%, 85%, 90%, 95%, 97%, 98%, 99%, 99.5%, 99.6%, 99.7%, 99.8%, or 99.9% sequence identity to the sequence of SEQ ID NO: 3518.

[0755] In some embodiments, the multifunctional polypeptide molecule comprises: (i) a first polypeptide comprising the sequence of SEQ ID NO: 3517; (ii) a second polypeptide comprising the sequence of SEQ ID NO: 3519; and (iii) a third polypeptide comprising to the sequence of SEQ ID NO: 3518.

[0756] In some embodiments, the multifunctional polypeptide molecule comprises: (i) a first polypeptide comprising a sequence having at least 50%, 55%, 60%, 65%, 70%, 75%, 80%, 85%, 90%, 95%, 97%, 98%, 99%, 99.5%, 99.6%, 99.7%, 99.8%, or 99.9% sequence identity to the sequence of SEQ ID NO: 1346, and a sequence having at least 50%, 55%, 60%, 65%, 70%, 75%, 80%, 85%, 90%, 95%, 97%, 98%, 99%, 99.5%, 99.6%, 99.7%, 99.8%, or 99.9% sequence identity to the sequence of SEQ ID NO: 3649; (ii) a second polypeptide comprising a sequence having at least 50%, 55%, 60%, 65%, 70%, 75%, 80%, 85%, 90%, 95%, 97%, 98%, 99%, 99.5%, 99.6%, 99.7%, 99.8%, or 99.9% sequence identity to the sequence of SEQ ID NO: 2170, and a sequence having at least 50%, 55%, 60%, 65%, 70%, 75%, 80%, 85%, 90%, 95%, 97%, 98%, 99%, 99.5%, 99.6%, 99.7%, 99.8%, or 99.9% sequence identity to the sequence of SEQ ID NO: 3648; and (iii) a third polypeptide comprising a sequence having at least 50%, 55%, 60%, 65%, 70%, 75%, 80%, 85%, 90%, 95%, 97%, 98%, 99%, 99.5%, 99.6%, 99.7%, 99.8%, or 99.9% sequence identity to the sequence of SEQ ID NO: 1349, and a sequence having at least 50%, 55%, 60%, 65%, 70%, 75%, 80%, 85%, 90%, 95%, 97%, 98%, 99%, 99.5%, 99.6%, 99.7%, 99.8%, or 99.9% sequence identity to the sequence of SEQ ID NO: 3644.

[0757] In some embodiments, the multifunctional polypeptide molecule comprises: (i) a first polypeptide comprising the sequence of SEQ ID NO: 1346, and the sequence of SEQ ID NO: 3649; (ii) a second polypeptide comprising the sequence of SEQ ID NO: 2170, and the sequence of SEQ ID NO: 3648; and (iii) a third polypeptide comprising the sequence of SEQ ID NO: 1349, and the sequence of SEQ ID NO: 3644.

[0758] In some embodiments, the multifunctional polypeptide molecule comprises: (i) a first polypeptide comprising, from the N-terminus to the C-terminus, a sequence having at least 50%, 55%, 60%, 65%, 70%, 75%, 80%, 85%, 90%, 95%, 97%, 98%, 99%, 99.5%, 99.6%, 99.7%, 99.8%, or 99.9% sequence identity to the sequence of SEQ ID NO: 1346 operatively linked to a sequence having at least 50%, 55%, 60%, 65%, 70%, 75%, 80%, 85%, 90%, 95%, 97%, 98%, 99%, 99.5%, 99.6%, 99.7%, 99.8%, or 99.9% sequence identity to the sequence of SEQ ID NO: 3649; (ii) a second polypeptide comprising, from the N-terminus to the C-terminus, a sequence having at least 50%, 55%, 60%, 65%, 70%, 75%, 80%, 85%, 90%, 95%, 97%, 98%, 99%, 99.5%, 99.6%, 99.7%, 99.8%, or 99.9% sequence identity to the sequence of SEQ ID NO: 2170 operatively linked to a sequence having at least 50%, 55%, 60%, 65%, 70%, 75%, 80%, 85%, 90%, 95%, 97%, 98%, 99%, 99.5%, 99.6%, 99.7%, 99.8%, or 99.9% sequence identity to the sequence of SEQ ID NO: 3648; and (iii) a third polypeptide comprising, from the N-terminus to the C-terminus, a sequence having at least 50%, 55%, 60%, 65%, 70%, 75%, 80%, 85%, 90%, 95%, 97%, 98%, 99%, 99.5%, 99.6%, 99.7%, 99.8%, or 99.9% sequence identity to the sequence of SEQ ID NO: 1349 operatively linked to a sequence having at least 50%, 55%, 60%, 65%, 70%, 75%, 80%, 85%, 90%, 95%, 97%, 98%, 99%, 99.5%, 99.6%, 99.7%, 99.8%, or 99.9% sequence identity to the sequence of SEQ ID NO: 3644.

[0759] In some embodiments, the multifunctional polypeptide molecule comprises: (i) a first polypeptide comprising, from the N-terminus to the C-terminus, the sequence of SEQ ID NO: 1346 operatively linked to the sequence of SEQ ID NO: 3649; (ii) a second polypeptide comprising, from the N-terminus to the C-terminus, the sequence of SEQ ID NO: 2170 operatively linked to the sequence of SEQ ID NO: 3648; and (iii) a third polypeptide comprising, from the N-terminus to the C-terminus, the sequence of SEQ ID NO: 1349 operatively linked to the sequence of SEQ ID NO: 3644.

[0760] In some embodiments, a sequence having at least 50%, 55%, 60%, 65%, 70%, 75%, 80%, 85%, 90%, 95%, 97%, 98%, 99%, 99.5%, 99.6%, 99.7%, 99.8%, or 99.9% sequence identity to the sequence of SEQ ID NO: 2170 is operatively linked to a sequence having at least 50%, 55%, 60%, 65%, 70%, 75%, 80%, 85%, 90%, 95%, 97%, 98%, 99%, 99.5%, 99.6%, 99.7%, 99.8%, or 99.9% sequence identity to the sequence of SEQ ID NO: 3648 via a sequence having at least 50%, 55%, 60%, 65%, 70%, 75%, 80%, 85%, 90%, 95%, 97%, 98%, 99%, 99.5%, 99.6%, 99.7%, 99.8%, or 99.9% sequence identity to the sequence of SEQ ID NO: 3308, or a combination thereof.

[0761] In some embodiments, the sequence of SEQ ID NO: 2170 is operatively linked to the sequence of SEQ ID NO: 3648 via the sequence of SEQ ID NO: 3308, or a combination thereof.

[0762] In some embodiments, the multifunctional polypeptide molecule comprises: (i) a first polypeptide comprising a sequence having at least 50%, 55%, 60%, 65%, 70%, 75%, 80%, 85%, 90%, 95%, 97%, 98%, 99%, 99.5%, 99.6%, 99.7%, 99.8%, or 99.9% sequence identity to the sequence of SEQ ID NO: 3517; (ii) a second polypeptide comprising a sequence having at least 50%, 55%, 60%, 65%, 70%, 75%, 80%, 85%, 90%, 95%, 97%, 98%, 99%, 99.5%, 99.6%, 99.7%, 99.8%, or 99.9% sequence identity to the sequence of SEQ ID NO: 3520; and (iii) a third polypeptide comprising a sequence having at least 50%, 55%, 60%, 65%, 70%, 75%, 80%, 85%, 90%, 95%, 97%, 98%, 99%, 99.5%, 99.6%, 99.7%, 99.8%, or 99.9% sequence identity to the sequence of SEQ ID NO: 3518.

[0763] In some embodiments, the multifunctional polypeptide molecule comprises: (i) a first polypeptide comprising the sequence of SEQ ID NO: 3517; (ii) a second polypeptide comprising the sequence of SEQ ID NO: 3520; and (iii) a third polypeptide comprising to the sequence of SEQ ID NO: 3518.

[0764] In some embodiments, the IL-2 molecule or a functional fragment or a functional variant thereof or the IL-2 C125A mutant molecule or a functional fragment or a functional variant thereof is operatively linked to the immunoglobulin heavy chain constant region via a linker.

[0765] In some embodiments, the multifunctional polypeptide molecule comprises: (i) a first polypeptide comprising a sequence having at least 50%, 55%, 60%, 65%, 70%, 75%, 80%, 85%, 90%, 95%, 97%, 98%, 99%, 99.5%, 99.6%, 99.7%, 99.8%, or 99.9% sequence identity to the sequence of SEQ ID NO: 1346, and a sequence having at least 50%, 55%, 60%, 65%, 70%, 75%, 80%, 85%, 90%, 95%, 97%, 98%, 99%, 99.5%, 99.6%, 99.7%, 99.8%, or 99.9% sequence identity to the sequence of SEQ ID NO: 3649; (ii) a second polypeptide comprising a sequence having at least 50%, 55%, 60%, 65%, 70%, 75%, 80%, 85%, 90%, 95%, 97%, 98%, 99%, 99.5%, 99.6%, 99.7%, 99.8%, or 99.9% sequence identity to the sequence of SEQ ID NO: 2270, and a sequence having at least 50%, 55%, 60%, 65%, 70%, 75%, 80%, 85%, 90%, 95%, 97%, 98%, 99%, 99.5%, 99.6%, 99.7%, 99.8%, or 99.9% sequence identity to the sequence of SEQ ID NO: 3648; and (iii) a third polypeptide comprising a sequence having at least 50%, 55%, 60%, 65%, 70%, 75%, 80%, 85%, 90%, 95%, 97%, 98%, 99%, 99.5%, 99.6%, 99.7%, 99.8%, or 99.9% sequence identity to the sequence of SEQ ID NO: 1349, and a sequence having at least 50%, 55%, 60%, 65%, 70%, 75%, 80%, 85%, 90%, 95%, 97%, 98%, 99%, 99.5%, 99.6%, 99.7%, 99.8%, or 99.9% sequence identity to the sequence of SEQ ID NO: 3644.

[0766] In some embodiments, the IL-2 molecule or a functional fragment or a functional variant thereof or the IL-2 C125A mutant molecule or a functional fragment or a functional variant thereof is operatively linked to the immunoglobulin heavy chain constant region via a linker.

[0767] In some embodiments, the multifunctional polypeptide molecule comprises: (i) a first polypeptide comprising the sequence of SEQ ID NO: 1346, and the sequence of SEQ ID NO: 3649; (ii) a second polypeptide comprising the sequence of SEQ ID NO: 2270, and the sequence of SEQ ID NO: 3648; and (iii) a third polypeptide comprising the sequence of SEQ ID NO: 1349, and the sequence of SEQ ID NO: 3644.

[0768] In some embodiments, the multifunctional polypeptide molecule comprises: (i) a first polypeptide comprising, from the N-terminus to the C-terminus, a sequence having at least 50%, 55%, 60%, 65%, 70%, 75%, 80%, 85%, 90%, 95%, 97%, 98%, 99%, 99.5%, 99.6%, 99.7%, 99.8%, or 99.9% sequence identity to the sequence of SEQ ID NO: 1346 operatively linked to a sequence having at least 50%, 55%, 60%, 65%, 70%, 75%, 80%, 85%, 90%, 95%, 97%, 98%, 99%, 99.5%, 99.6%, 99.7%, 99.8%, or 99.9% sequence identity to the sequence of SEQ ID NO: 3649; (ii) a second polypeptide comprising, from the N-terminus to the C-terminus, a sequence having at least 50%, 55%, 60%, 65%, 70%, 75%, 80%, 85%, 90%, 95%, 97%, 98%, 99%, 99.5%, 99.6%, 99.7%, 99.8%, or 99.9% sequence identity to the sequence of SEQ ID NO: 2270 operatively linked to a sequence having at least 50%, 55%, 60%, 65%, 70%, 75%, 80%, 85%, 90%, 95%, 97%, 98%, 99%, 99.5%, 99.6%, 99.7%, 99.8%, or 99.9% sequence identity to the sequence of SEQ ID NO: 3648; and (iii) a third polypeptide comprising, from the N-terminus to the C-terminus, a sequence having at least 50%, 55%, 60%, 65%, 70%, 75%, 80%, 85%, 90%, 95%, 97%, 98%, 99%, 99.5%, 99.6%, 99.7%, 99.8%, or 99.9% sequence identity to the sequence of SEQ ID NO: 1349 operatively linked to a sequence having at least 50%, 55%, 60%, 65%, 70%, 75%, 80%, 85%, 90%, 95%, 97%, 98%, 99%, 99.5%, 99.6%, 99.7%, 99.8%, or 99.9% sequence identity to the sequence of SEQ ID NO: 3644.

[0769] In some embodiments, the multifunctional polypeptide molecule comprises: (i) a first polypeptide comprising, from the N-terminus to the C-terminus, the sequence of SEQ ID NO: 1346 operatively linked to the sequence of SEQ ID NO: 3649; (ii) a second polypeptide comprising, from the N-terminus to the C-terminus, the sequence of SEQ ID NO: 2270 operatively linked to the sequence of SEQ ID NO: 3648; and (iii) a third polypeptide comprising, from the N-terminus to the C-terminus, the sequence of SEQ ID NO: 1349 operatively linked to the sequence of SEQ ID NO: 3644.

[0770] In some embodiments, a sequence having at least 50%, 55%, 60%, 65%, 70%, 75%, 80%, 85%, 90%, 95%, 97%, 98%, 99%, 99.5%, 99.6%, 99.7%, 99.8%, or 99.9% sequence identity to the sequence of SEQ ID NO: 2270 is operatively linked to a sequence having at least 50%, 55%, 60%, 65%, 70%, 75%, 80%, 85%, 90%, 95%, 97%, 98%, 99%, 99.5%, 99.6%, 99.7%, 99.8%, or 99.9% sequence identity to the sequence of SEQ ID NO: 3648 via a sequence having at least 50%, 55%, 60%, 65%, 70%, 75%, 80%, 85%, 90%, 95%, 97%, 98%, 99%, 99.5%, 99.6%, 99.7%, 99.8%, or 99.9% sequence identity to the sequence of SEQ ID NO: 3308, or a combination thereof.

[0771] In some embodiments, the sequence of SEQ ID NO: 2270 is operatively linked to the sequence of SEQ ID NO: 3648 via the sequence of SEQ ID NO: 3308, or a combination thereof.

[0772] In some embodiments, the multifunctional polypeptide molecule comprises: (i) a first polypeptide comprising a sequence having at least 50%, 55%, 60%, 65%, 70%, 75%, 80%, 85%, 90%, 95%, 97%, 98%, 99%, 99.5%, 99.6%, 99.7%, 99.8%, or 99.9% sequence identity to the sequence of SEQ ID NO: 3517; (ii) a second polypeptide comprising a sequence having at least 50%, 55%, 60%, 65%, 70%, 75%, 80%, 85%, 90%, 95%, 97%, 98%, 99%, 99.5%, 99.6%, 99.7%, 99.8%, or 99.9% sequence identity to the sequence of SEQ ID NO: 3521 or 7515; and (iii) a third polypeptide comprising a sequence having at least 50%, 55%, 60%, 65%, 70%, 75%, 80%, 85%, 90%, 95%, 97%, 98%, 99%, 99.5%, 99.6%, 99.7%, 99.8%, or 99.9% sequence identity to the sequence of SEQ ID NO: 3518.

[0773] In some embodiments, the multifunctional polypeptide molecule comprises: (i) a first polypeptide comprising the sequence of SEQ ID NO: 3517; (ii) a second polypeptide comprising the sequence of SEQ ID NO: 3521 or 7515; and (iii) a third polypeptide comprising to the sequence of SEQ ID NO: 3518.

[0774] In some embodiments, the multifunctional polypeptide molecule comprises: (i) a first polypeptide comprising a sequence having at least 50%, 55%, 60%, 65%, 70%, 75%, 80%, 85%, 90%, 95%, 97%, 98%, 99%, 99.5%, 99.6%, 99.7%, 99.8%, or 99.9% sequence identity to the sequence of SEQ ID NO: 3530, and a sequence having at least 50%, 55%, 60%, 65%, 70%, 75%, 80%, 85%, 90%, 95%, 97%, 98%, 99%, 99.5%, 99.6%, 99.7%, 99.8%, or 99.9% sequence identity to the sequence of SEQ ID NO: 3531; (ii) a second polypeptide comprising a sequence having at least 50%, 55%, 60%, 65%, 70%, 75%, 80%, 85%, 90%, 95%, 97%, 98%, 99%, 99.5%, 99.6%, 99.7%, 99.8%, or 99.9% sequence identity to the sequence of SEQ ID NO: 2191, and a sequence having at least 50%, 55%, 60%, 65%, 70%, 75%, 80%, 85%, 90%, 95%, 97%, 98%, 99%, 99.5%, 99.6%, 99.7%, 99.8%, or 99.9% sequence identity to the sequence of SEQ ID NO: 3533; and (iii) a third polypeptide comprising a sequence having at least 50%, 55%, 60%, 65%, 70%, 75%, 80%, 85%, 90%, 95%, 97%, 98%, 99%, 99.5%, 99.6%, 99.7%, 99.8%, or 99.9% sequence identity to the sequence of SEQ ID NO: 3527, and a sequence having at least 50%, 55%, 60%, 65%, 70%, 75%, 80%, 85%, 90%, 95%, 97%, 98%, 99%, 99.5%, 99.6%, 99.7%, 99.8%, or 99.9% sequence identity to the sequence of SEQ ID NO: 3528.

[0775] In some embodiments, the multifunctional polypeptide molecule comprises: (i) a first polypeptide comprising the sequence of SEQ ID NO: 3530, and the sequence of SEQ ID NO: 3531; (ii) a second polypeptide comprising the sequence of SEQ ID NO: 2191, and the sequence of SEQ ID NO: 3533; and (iii) a third polypeptide comprising the sequence of SEQ ID NO: 3527, and the sequence of SEQ ID NO: 3528.

[0776] In some embodiments, the multifunctional polypeptide molecule comprises: (i) a first polypeptide comprising, from the N-terminus to the C-terminus, a sequence having at least 50%, 55%, 60%, 65%, 70%, 75%, 80%, 85%, 90%, 95%, 97%, 98%, 99%, 99.5%, 99.6%, 99.7%, 99.8%, or 99.9% sequence identity to the sequence of SEQ ID NO: 3530 operatively linked to a sequence having at least 50%, 55%, 60%, 65%, 70%, 75%, 80%, 85%, 90%, 95%, 97%, 98%, 99%, 99.5%, 99.6%, 99.7%, 99.8%, or 99.9% sequence identity to the sequence of SEQ ID NO: 3531; (ii) a second polypeptide comprising, from the N-terminus to the C-terminus, a sequence having at least 50%, 55%, 60%, 65%, 70%, 75%, 80%, 85%, 90%, 95%, 97%, 98%, 99%, 99.5%, 99.6%, 99.7%, 99.8%, or 99.9% sequence identity to the sequence of SEQ ID NO: 2191 operatively linked to a sequence having at least 50%, 55%, 60%, 65%, 70%, 75%, 80%, 85%, 90%, 95%, 97%, 98%, 99%, 99.5%, 99.6%, 99.7%, 99.8%, or 99.9% sequence identity to the sequence of SEQ ID NO: 3533; and (iii) a third polypeptide comprising, from the N-terminus to the C-terminus, a sequence having at least 50%, 55%, 60%, 65%, 70%, 75%, 80%, 85%, 90%, 95%, 97%, 98%, 99%, 99.5%, 99.6%, 99.7%, 99.8%, or 99.9% sequence identity to the sequence of SEQ ID NO: 3527 operatively linked to a sequence having at least 50%, 55%, 60%, 65%, 70%, 75%, 80%, 85%, 90%, 95%, 97%, 98%, 99%, 99.5%, 99.6%, 99.7%, 99.8%, or 99.9% sequence identity to the sequence of SEQ ID NO: 3528.

[0777] In some embodiments, the multifunctional polypeptide molecule comprises: (i) a first polypeptide comprising, from the N-terminus to the C-terminus, the sequence of SEQ ID NO: 3530 operatively linked to the sequence of SEQ ID NO: 3531; (ii) a second polypeptide comprising, from the N-terminus to the C-terminus, the sequence of SEQ ID NO: 2191 operatively linked to the sequence of SEQ ID NO: 3533; and (iii) a third polypeptide comprising, from the N-terminus to the C-terminus, the sequence of SEQ ID NO: 3527 operatively linked to the sequence of SEQ ID NO: 3528.

[0778] In some embodiments, a sequence having at least 50%, 55%, 60%, 65%, 70%, 75%, 80%, 85%, 90%, 95%, 97%, 98%, 99%, 99.5%, 99.6%, 99.7%, 99.8%, or 99.9% sequence identity to the sequence of SEQ ID NO: 2191 is operatively linked to a sequence having at least 50%, 55%, 60%, 65%, 70%, 75%, 80%, 85%, 90%, 95%, 97%, 98%, 99%, 99.5%, 99.6%, 99.7%, 99.8%, or 99.9% sequence identity to the sequence of SEQ ID NO: 3533 via a sequence having at least 50%, 55%, 60%, 65%, 70%, 75%, 80%, 85%, 90%, 95%, 97%, 98%, 99%, 99.5%, 99.6%, 99.7%, 99.8%, or 99.9% sequence identity to the sequence of SEQ ID NO: 3308, or a combination thereof.

[0779] In some embodiments, the sequence of SEQ ID NO: 2191 is operatively linked to the sequence of SEQ ID NO: 3533 via the sequence of SEQ ID NO: 3308, or a combination thereof.

[0780] In some embodiments, the first polypeptide further comprises a sequence having at least 50%, 55%, 60%, 65%, 70%, 75%, 80%, 85%, 90%, 95%, 97%, 98%, 99%, 99.5%, 99.6%, 99.7%, 99.8%, or 99.9% sequence identity to the sequence of SEQ ID NO: 3547 operatively linked to a sequence having at least 50%, 55%, 60%, 65%, 70%, 75%, 80%, 85%, 90%, 95%, 97%, 98%, 99%, 99.5%, 99.6%, 99.7%, 99.8%, or 99.9% sequence identity to the sequence of SEQ ID NO: 3531, the second polypeptide further comprises a sequence having at least 50%, 55%, 60%, 65%, 70%, 75%, 80%, 85%, 90%, 95%, 97%, 98%, 99%, 99.5%, 99.6%, 99.7%, 99.8%, or 99.9% sequence identity to the sequence of SEQ ID NO: 3534 operatively linked to a sequence having at least 50%, 55%, 60%, 65%, 70%, 75%, 80%, 85%, 90%, 95%, 97%, 98%, 99%, 99.5%, 99.6%, 99.7%, 99.8%, or 99.9% sequence identity to the sequence of SEQ ID NO: 3533, or a combination thereof.

[0781] In some embodiments, the first polypeptide further comprises the sequence of SEQ ID NO: 3547 operatively linked to the sequence of SEQ ID NO: 3531, the second polypeptide further comprises the sequence of SEQ ID NO: 3534 operatively linked to the sequence of SEQ ID NO: 3533, or a combination thereof.

[0782] In some embodiments, the multifunctional polypeptide molecule comprises: (i) a first polypeptide comprising a sequence having at least 50%, 55%, 60%, 65%, 70%, 75%, 80%, 85%, 90%, 95%, 97%, 98%, 99%, 99.5%, 99.6%, 99.7%, 99.8%, or 99.9% sequence identity to the sequence of SEQ ID NO: 3529 or the sequence of SEQ ID NO: 3548; (ii) a second polypeptide comprising a sequence having at least 50%, 55%, 60%, 65%, 70%, 75%, 80%, 85%, 90%, 95%, 97%, 98%, 99%, 99.5%, 99.6%, 99.7%, 99.8%, or 99.9% sequence identity to the sequence of SEQ ID NO: 3532 or the sequence of SEQ ID NO: 3549; and (iii) a third polypeptide comprising a sequence having at least 50%, 55%, 60%, 65%, 70%, 75%, 80%, 85%, 90%, 95%, 97%, 98%, 99%, 99.5%, 99.6%, 99.7%, 99.8%, or 99.9% sequence identity to the sequence of SEQ ID NO: 3526.

[0783] In some embodiments, the multifunctional polypeptide molecule comprises: (i) a first polypeptide comprising the sequence of SEQ ID NO: 3529 or the sequence of SEQ ID NO: 3548; (ii) a second polypeptide comprising the sequence of SEQ ID NO: 3532 or the sequence of SEQ ID NO: 3549; and (iii) a third polypeptide comprising to the sequence of SEQ ID NO: 3526.

[0784] In some embodiments, the multifunctional polypeptide molecule comprises: (i) a first polypeptide comprising a sequence having at least 50%, 55%, 60%, 65%, 70%, 75%, 80%, 85%, 90%, 95%, 97%, 98%, 99%, 99.5%, 99.6%, 99.7%, 99.8%, or 99.9% sequence identity to the sequence of SEQ ID NO: 1346, and a sequence having at least 50%, 55%, 60%, 65%, 70%, 75%, 80%, 85%, 90%, 95%, 97%, 98%, 99%, 99.5%, 99.6%, 99.7%, 99.8%, or 99.9% sequence identity to the sequence of SEQ ID NO: 3649; (ii) a second polypeptide comprising a sequence having at least 50%, 55%, 60%, 65%, 70%, 75%, 80%, 85%, 90%, 95%, 97%, 98%, 99%, 99.5%, 99.6%, 99.7%, 99.8%, or 99.9% sequence identity to the sequence of SEQ ID NO: 3540, and a sequence having at least 50%, 55%, 60%, 65%, 70%, 75%, 80%, 85%, 90%, 95%, 97%, 98%, 99%, 99.5%, 99.6%, 99.7%, 99.8%, or 99.9% sequence identity to the sequence of SEQ ID NO: 3648; and (iii) a third polypeptide comprising a sequence having at least 50%, 55%, 60%, 65%, 70%, 75%, 80%, 85%, 90%, 95%, 97%, 98%, 99%, 99.5%, 99.6%, 99.7%, 99.8%, or 99.9% sequence identity to the sequence of SEQ ID NO: 1349, and a sequence having at least 50%, 55%, 60%, 65%, 70%, 75%, 80%, 85%, 90%, 95%, 97%, 98%, 99%, 99.5%, 99.6%, 99.7%, 99.8%, or 99.9% sequence identity to the sequence of SEQ ID NO: 3644.

[0785] In some embodiments, the multifunctional polypeptide molecule comprises: (i) a first polypeptide comprising the sequence of SEQ ID NO: 1346, and the sequence of SEQ ID NO: 3649; (ii) a second polypeptide comprising the sequence of SEQ ID NO: 3540, and the sequence of SEQ ID NO: 3648; and (iii) a third polypeptide comprising the sequence of SEQ ID NO: 1349, and the sequence of SEQ ID NO: 3644.

[0786] In some embodiments, the multifunctional polypeptide molecule comprises: (i) a first polypeptide comprising, from the N-terminus to the C-terminus, a sequence having at least 50%, 55%, 60%, 65%, 70%, 75%, 80%, 85%, 90%, 95%, 97%, 98%, 99%, 99.5%, 99.6%, 99.7%, 99.8%, or 99.9% sequence identity to the sequence of SEQ ID NO: 1346 operatively linked to a sequence having at least 50%, 55%, 60%, 65%, 70%, 75%, 80%, 85%, 90%, 95%, 97%, 98%, 99%, 99.5%, 99.6%, 99.7%, 99.8%, or 99.9% sequence identity to the sequence of SEQ ID NO: 3649; (ii) a second polypeptide comprising, from the N-terminus to the C-terminus, a sequence having at least 50%, 55%, 60%, 65%, 70%, 75%, 80%, 85%, 90%, 95%, 97%, 98%, 99%, 99.5%, 99.6%, 99.7%, 99.8%, or 99.9% sequence identity to the sequence of SEQ ID NO: 3540 operatively linked to a sequence having at least 50%, 55%, 60%, 65%, 70%, 75%, 80%, 85%, 90%, 95%, 97%, 98%, 99%, 99.5%, 99.6%, 99.7%, 99.8%, or 99.9% sequence identity to the sequence of SEQ ID NO: 3648; and (iii) a third polypeptide comprising, from the N-terminus to the C-terminus, a sequence having at least 50%, 55%, 60%, 65%, 70%, 75%, 80%, 85%, 90%, 95%, 97%, 98%, 99%, 99.5%, 99.6%, 99.7%, 99.8%, or 99.9% sequence identity to the sequence of SEQ ID NO: 1349 operatively linked to a sequence having at least 50%, 55%, 60%, 65%, 70%, 75%, 80%, 85%, 90%, 95%, 97%, 98%, 99%, 99.5%, 99.6%, 99.7%, 99.8%, or 99.9% sequence identity to the sequence of SEQ ID NO: 3644.

[0787] In some embodiments, the multifunctional polypeptide molecule comprises: (i) a first polypeptide comprising, from the N-terminus to the C-terminus, the sequence of SEQ ID NO: 1346 operatively linked to the sequence of SEQ ID NO: 3649; (ii) a second polypeptide comprising, from the N-terminus to the C-terminus, the sequence of SEQ ID NO: 3540 operatively linked to the sequence of SEQ ID NO: 3648; and (iii) a third polypeptide comprising, from the N-terminus to the C-terminus, the sequence of SEQ ID NO: 1349 operatively linked to the sequence of SEQ ID NO: 3644.

[0788] In some embodiments, a sequence having at least 50%, 55%, 60%, 65%, 70%, 75%, 80%, 85%, 90%, 95%, 97%, 98%, 99%, 99.5%, 99.6%, 99.7%, 99.8%, or 99.9% sequence identity to the sequence of SEQ ID NO: 3540 is operatively linked to a sequence having at least 50%, 55%, 60%, 65%, 70%, 75%, 80%, 85%, 90%, 95%, 97%, 98%, 99%, 99.5%, 99.6%, 99.7%, 99.8%, or 99.9% sequence identity to the sequence of SEQ ID NO: 3648 via a sequence having at least 50%, 55%, 60%, 65%, 70%, 75%, 80%, 85%, 90%, 95%, 97%, 98%, 99%, 99.5%, 99.6%, 99.7%, 99.8%, or 99.9% sequence identity to the sequence of SEQ ID NO: 3308, or a combination thereof.

[0789] In some embodiments, the sequence of SEQ ID NO: 3540 is operatively linked to the sequence of SEQ ID NO: 3648 via the sequence of SEQ ID NO: 3308, or a combination thereof.

[0790] In some embodiments, the multifunctional polypeptide molecule comprises: (i) a first polypeptide comprising a sequence having at least 50%, 55%, 60%, 65%, 70%, 75%, 80%, 85%, 90%, 95%, 97%, 98%, 99%, 99.5%, 99.6%, 99.7%, 99.8%, or 99.9% sequence identity to the sequence of SEQ ID NO: 3517; (ii) a second polypeptide comprising a sequence having at least 50%, 55%, 60%, 65%, 70%, 75%, 80%, 85%, 90%, 95%, 97%, 98%, 99%, 99.5%, 99.6%, 99.7%, 99.8%, or 99.9% sequence identity to the sequence of SEQ ID NO: 3539; and (iii) a third polypeptide comprising a sequence having at least 50%, 55%, 60%, 65%, 70%, 75%, 80%, 85%, 90%, 95%, 97%, 98%, 99%, 99.5%, 99.6%, 99.7%, 99.8%, or 99.9% sequence identity to the sequence of SEQ ID NO: 3518.

[0791] In some embodiments, the multifunctional polypeptide molecule comprises: (i) a first polypeptide comprising the sequence of SEQ ID NO: 3517; (ii) a second polypeptide comprising the sequence of SEQ ID NO: 3539; and (iii) a third polypeptide comprising to the sequence of SEQ ID NO: 3518.

[0792] In some embodiments, the multifunctional polypeptide molecule comprises: (i) a first polypeptide comprising a sequence having at least 50%, 55%, 60%, 65%, 70%, 75%, 80%, 85%, 90%, 95%, 97%, 98%, 99%, 99.5%, 99.6%, 99.7%, 99.8%, or 99.9% sequence identity to the sequence of SEQ ID NO: 1346, and a sequence having at least 50%, 55%, 60%, 65%, 70%, 75%, 80%, 85%, 90%, 95%, 97%, 98%, 99%, 99.5%, 99.6%, 99.7%, 99.8%, or 99.9% sequence identity to the sequence of SEQ ID NO: 3649; (ii) a second polypeptide comprising a sequence having at least 50%, 55%, 60%, 65%, 70%, 75%, 80%, 85%, 90%, 95%, 97%, 98%, 99%, 99.5%, 99.6%, 99.7%, 99.8%, or 99.9% sequence identity to the sequence of SEQ ID NO: 3542, and a sequence having at least 50%, 55%, 60%, 65%, 70%, 75%, 80%, 85%, 90%, 95%, 97%, 98%, 99%, 99.5%, 99.6%, 99.7%, 99.8%, or 99.9% sequence identity to the sequence of SEQ ID NO: 3648; and (iii) a third polypeptide comprising a sequence having at least 50%, 55%, 60%, 65%, 70%, 75%, 80%, 85%, 90%, 95%, 97%, 98%, 99%, 99.5%, 99.6%, 99.7%, 99.8%, or 99.9% sequence identity to the sequence of SEQ ID NO: 1349, and a sequence having at least 50%, 55%, 60%, 65%, 70%, 75%, 80%, 85%, 90%, 95%, 97%, 98%, 99%, 99.5%, 99.6%, 99.7%, 99.8%, or 99.9% sequence identity to the sequence of SEQ ID NO: 3644.

[0793] In some embodiments, the multifunctional polypeptide molecule comprises: (i) a first polypeptide comprising the sequence of SEQ ID NO: 1346, and the sequence of SEQ ID NO: 3649; (ii) a second polypeptide comprising the sequence of SEQ ID NO: 3542, and the sequence of SEQ ID NO: 3648; and (iii) a third polypeptide comprising the sequence of SEQ ID NO: 1349, and the sequence of SEQ ID NO: 3644.

[0794] In some embodiments, the multifunctional polypeptide molecule comprises: (i) a first polypeptide comprising, from the N-terminus to the C-terminus, a sequence having at least 50%, 55%, 60%, 65%, 70%, 75%, 80%, 85%, 90%, 95%, 97%, 98%, 99%, 99.5%, 99.6%, 99.7%, 99.8%, or 99.9% sequence identity to the sequence of SEQ ID NO: 1346 operatively linked to a sequence having at least 50%, 55%, 60%, 65%, 70%, 75%, 80%, 85%, 90%, 95%, 97%, 98%, 99%, 99.5%, 99.6%, 99.7%, 99.8%, or 99.9% sequence identity to the sequence of SEQ ID NO: 3649; (ii) a second polypeptide comprising, from the N-terminus to the C-terminus, a sequence having at least 50%, 55%, 60%, 65%, 70%, 75%, 80%, 85%, 90%, 95%, 97%, 98%, 99%, 99.5%, 99.6%, 99.7%, 99.8%, or 99.9% sequence identity to the sequence of SEQ ID NO: 3542 operatively linked to a sequence having at least 50%, 55%, 60%, 65%, 70%, 75%, 80%, 85%, 90%, 95%, 97%, 98%, 99%, 99.5%, 99.6%, 99.7%, 99.8%, or 99.9% sequence identity to the sequence of SEQ ID NO: 3648; and (iii) a third polypeptide comprising, from the N-terminus to the C-terminus, a sequence having at least 50%, 55%, 60%, 65%, 70%, 75%, 80%, 85%, 90%, 95%, 97%, 98%, 99%, 99.5%, 99.6%, 99.7%, 99.8%, or 99.9% sequence identity to the sequence of SEQ ID NO: 1349 operatively linked to a sequence having at least 50%, 55%, 60%, 65%, 70%, 75%, 80%, 85%, 90%, 95%, 97%, 98%, 99%, 99.5%, 99.6%, 99.7%, 99.8%, or 99.9% sequence identity to the sequence of SEQ ID NO: 3644.

[0795] In some embodiments, the multifunctional polypeptide molecule comprises: (i) a first polypeptide comprising, from the N-terminus to the C-terminus, the sequence of SEQ ID NO: 1346 operatively linked to the sequence of SEQ ID NO: 3649; (ii) a second polypeptide comprising, from the N-terminus to the C-terminus, the sequence of SEQ ID NO: 3542 operatively linked to the sequence of SEQ ID NO: 3648; and (iii) a third polypeptide comprising, from the N-terminus to the C-terminus, the sequence of SEQ ID NO: 1349 operatively linked to the sequence of SEQ ID NO: 3644.

[0796] In some embodiments, the IL-12 molecule or a functional fragment or a functional variant thereof comprises a sequence having at least 50%, 55%, 60%, 65%, 70%, 75%, 80%, 85%, 90%, 95%, 97%, 98%, 99%, 99.5%, 99.6%, 99.7%, 99.8%, or 99.9% sequence identity to the sequence of SEQ ID NO: 3543 and a sequence having at least 50%, 55%, 60%, 65%, 70%, 75%, 80%, 85%, 90%, 95%, 97%, 98%, 99%, 99.5%, 99.6%, 99.7%, 99.8%, or 99.9% sequence identity to the sequence of SEQ ID NO: 3545.

[0797] In some embodiments, the IL-12 molecule or a functional fragment or a functional variant thereof comprises the sequence of SEQ ID NO: 3543 and the sequence of SEQ ID NO: 3545.

[0798] In some embodiments, the IL-12 molecule or a functional fragment or a functional variant thereof comprises, from the N-terminus to the C-terminus, a sequence having at least 50%, 55%, 60%, 65%, 70%, 75%, 80%, 85%, 90%, 95%, 97%, 98%, 99%, 99.5%, 99.6%, 99.7%, 99.8%, or 99.9% sequence identity to the sequence of SEQ ID NO: 3543 operatively linked to a sequence having at least 50%, 55%, 60%, 65%, 70%, 75%, 80%, 85%, 90%, 95%, 97%, 98%, 99%, 99.5%, 99.6%, 99.7%, 99.8%, or 99.9% sequence identity to the sequence of SEQ ID NO:3545.

[0799] In some embodiments, the IL-12 molecule or a functional fragment or a functional variant thereof comprises, from the N-terminus to the C-terminus, the sequence of SEQ ID NO: 3543 operatively linked to the sequence of SEQ ID NO:3545.

[0800] In some embodiments, a sequence having at least 50%, 55%, 60%, 65%, 70%, 75%, 80%, 85%, 90%, 95%, 97%, 98%, 99%, 99.5%, 99.6%, 99.7%, 99.8%, or 99.9% sequence identity to the sequence of SEQ ID NO: 3543 is operatively linked to a sequence having at least 50%, 55%, 60%, 65%, 70%, 75%, 80%, 85%, 90%, 95%, 97%, 98%, 99%, 99.5%, 99.6%, 99.7%, 99.8%, or 99.9% sequence identity to the sequence of SEQ ID NO: 3545 via a sequence having at least 50%, 55%, 60%, 65%, 70%, 75%, 80%, 85%, 90%, 95%, 97%, 98%, 99%, 99.5%, 99.6%, 99.7%, 99.8%, or 99.9% sequence identity to the sequence of SEQ ID NO: 3544, a sequence having at least 50%, 55%, 60%, 65%, 70%, 75%, 80%, 85%, 90%, 95%, 97%, 98%, 99%, 99.5%, 99.6%, 99.7%, 99.8%, or 99.9% sequence identity to the sequence of SEQ ID NO: 3545 is operatively linked to a sequence having at least 50%, 55%, 60%, 65%, 70%, 75%, 80%, 85%, 90%, 95%, 97%, 98%, 99%, 99.5%, 99.6%, 99.7%, 99.8%, or 99.9% sequence identity to the sequence of SEQ ID NO: 3648 via a sequence having at least 50%, 55%, 60%, 65%, 70%, 75%, 80%, 85%, 90%, 95%, 97%, 98%, 99%, 99.5%, 99.6%, 99.7%, 99.8%, or 99.9% sequence identity to the sequence of SEQ ID NO: 3308, or a combination thereof.

[0801] In some embodiments, the sequence of SEQ ID NO: 3543 is operatively linked to the sequence of SEQ ID NO: 3545 via the sequence of SEQ ID NO: 3544, the sequence of SEQ ID NO: 3545 is operatively linked to the sequence of SEQ ID NO: 3648 via the sequence of SEQ ID NO: 3308, or a combination thereof.

[0802] In some embodiments, the multifunctional polypeptide molecule comprises: (i) a first polypeptide comprising a sequence having at least 50%, 55%, 60%, 65%, 70%, 75%, 80%, 85%, 90%, 95%, 97%, 98%, 99%, 99.5%, 99.6%, 99.7%, 99.8%, or 99.9% sequence identity to the sequence of SEQ ID NO: 3517; (ii) a second polypeptide comprising a sequence having at least 50%, 55%, 60%, 65%, 70%, 75%, 80%, 85%, 90%, 95%, 97%, 98%, 99%, 99.5%, 99.6%, 99.7%, 99.8%, or 99.9% sequence identity to the sequence of SEQ ID NO: 3541; and (iii) a third polypeptide comprising a sequence having at least 50%, 55%, 60%, 65%, 70%, 75%, 80%, 85%, 90%, 95%, 97%, 98%, 99%, 99.5%, 99.6%, 99.7%, 99.8%, or 99.9% sequence identity to the sequence of SEQ ID NO: 3518.

[0803] In some embodiments, the multifunctional polypeptide molecule comprises: (i) a first polypeptide comprising the sequence of SEQ ID NO: 3517; (ii) a second polypeptide comprising the sequence of SEQ ID NO: 3541; and (iii) a third polypeptide comprising to the sequence of SEQ ID NO: 3518.

[0804] In some embodiments, the multifunctional polypeptide molecule comprises: (i) a first polypeptide comprising a sequence having at least 50%, 55%, 60%, 65%, 70%, 75%, 80%, 85%, 90%, 95%, 97%, 98%, 99%, 99.5%, 99.6%, 99.7%, 99.8%, or 99.9% sequence identity to the sequence of SEQ ID NO: 1346, and a sequence having at least 50%, 55%, 60%, 65%, 70%, 75%, 80%, 85%, 90%, 95%, 97%, 98%, 99%, 99.5%, 99.6%, 99.7%, 99.8%, or 99.9% sequence identity to the sequence of SEQ ID NO: 3649; (ii) a second polypeptide comprising a sequence having at least 50%, 55%, 60%, 65%, 70%, 75%, 80%, 85%, 90%, 95%, 97%, 98%, 99%, 99.5%, 99.6%, 99.7%, 99.8%, or 99.9% sequence identity to the sequence of SEQ ID NO: 3540, and a sequence having at least 50%, 55%, 60%, 65%, 70%, 75%, 80%, 85%, 90%, 95%, 97%, 98%, 99%, 99.5%, 99.6%, 99.7%, 99.8%, or 99.9% sequence identity to the sequence of SEQ ID NO: 3648; and (iii) a third polypeptide comprising a sequence having at least 50%, 55%, 60%, 65%, 70%, 75%, 80%, 85%, 90%, 95%, 97%, 98%, 99%, 99.5%, 99.6%, 99.7%, 99.8%, or 99.9% sequence identity to the sequence of SEQ ID NO: 1349, and a sequence having at least 50%, 55%, 60%, 65%, 70%, 75%, 80%, 85%, 90%, 95%, 97%, 98%, 99%, 99.5%, 99.6%, 99.7%, 99.8%, or 99.9% sequence identity to the sequence of SEQ ID NO: 3644.

[0805] In some embodiments, the multifunctional polypeptide molecule comprises: (i) a first polypeptide comprising the sequence of SEQ ID NO: 1346, and the sequence of SEQ ID NO: 3649; (ii) a second polypeptide comprising the sequence of SEQ ID NO: 2193, and the sequence of SEQ ID NO: 3648; and (iii) a third polypeptide comprising the sequence of SEQ ID NO: 1349, and the sequence of SEQ ID NO: 3644.

[0806] In some embodiments, the multifunctional polypeptide molecule comprises: (i) a first polypeptide comprising, from the N-terminus to the C-terminus, a sequence having at least 50%, 55%, 60%, 65%, 70%, 75%, 80%, 85%, 90%, 95%, 97%, 98%, 99%, 99.5%, 99.6%, 99.7%, 99.8%, or 99.9% sequence identity to the sequence of SEQ ID NO: 1346 operatively linked to a sequence having at least 50%, 55%, 60%, 65%, 70%, 75%, 80%, 85%, 90%, 95%, 97%, 98%, 99%, 99.5%, 99.6%, 99.7%, 99.8%, or 99.9% sequence identity to the sequence of SEQ ID NO: 3649; (ii) a second polypeptide comprising, from the N-terminus to the C-terminus, a sequence having at least 50%, 55%, 60%, 65%, 70%, 75%, 80%, 85%, 90%, 95%, 97%, 98%, 99%, 99.5%, 99.6%, 99.7%, 99.8%, or 99.9% sequence identity to the sequence of SEQ ID NO: 2193 operatively linked to a sequence having at least 50%, 55%, 60%, 65%, 70%, 75%, 80%, 85%, 90%, 95%, 97%, 98%, 99%, 99.5%, 99.6%, 99.7%, 99.8%, or 99.9% sequence identity to the sequence of SEQ ID NO: 3648; and (iii) a third polypeptide comprising, from the N-terminus to the C-terminus, a sequence having at least 50%, 55%, 60%, 65%, 70%, 75%, 80%, 85%, 90%, 95%, 97%, 98%, 99%, 99.5%, 99.6%, 99.7%, 99.8%, or 99.9% sequence identity to the sequence of SEQ ID NO: 1349 operatively linked to a sequence having at least 50%, 55%, 60%, 65%, 70%, 75%, 80%, 85%, 90%, 95%, 97%, 98%, 99%, 99.5%, 99.6%, 99.7%, 99.8%, or 99.9% sequence identity to the sequence of SEQ ID NO: 3644.

[0807] In some embodiments, the multifunctional polypeptide molecule comprises: (i) a first polypeptide comprising, from the N-terminus to the C-terminus, the sequence of SEQ ID NO: 1346 operatively linked to the sequence of SEQ ID NO: 3649; (ii) a second polypeptide comprising, from the N-terminus to the C-terminus, the sequence of SEQ ID NO: 2193 operatively linked to the sequence of SEQ ID NO: 3648; and (iii) a third polypeptide comprising, from the N-terminus to the C-terminus, the sequence of SEQ ID NO: 1349 operatively linked to the sequence of SEQ ID NO: 3644.

[0808] In some embodiments, a sequence having at least 50%, 55%, 60%, 65%, 70%, 75%, 80%, 85%, 90%, 95%, 97%, 98%, 99%, 99.5%, 99.6%, 99.7%, 99.8%, or 99.9% sequence identity to the sequence of SEQ ID NO: 2193 is operatively linked to a sequence having at least 50%, 55%, 60%, 65%, 70%, 75%, 80%, 85%, 90%, 95%, 97%, 98%, 99%, 99.5%, 99.6%, 99.7%, 99.8%, or 99.9% sequence identity to the sequence of SEQ ID NO: 3648 via a sequence having at least 50%, 55%, 60%, 65%, 70%, 75%, 80%, 85%, 90%, 95%, 97%, 98%, 99%, 99.5%, 99.6%, 99.7%, 99.8%, or 99.9% sequence identity to the sequence of SEQ ID NO: 3308.

[0809] In some embodiments, the sequence of SEQ ID NO: 2193 is operatively linked to the sequence of SEQ ID NO: 3648 via the sequence of SEQ ID NO: 3308.

[0810] In some embodiments, the multifunctional polypeptide molecule comprises: (i) a first polypeptide comprising a sequence having at least 50%, 55%, 60%, 65%, 70%, 75%, 80%, 85%, 90%, 95%, 97%, 98%, 99%, 99.5%, 99.6%, 99.7%, 99.8%, or 99.9% sequence identity to the sequence of SEQ ID NO: 3517; (ii) a second polypeptide comprising a sequence having at least 50%, 55%, 60%, 65%, 70%, 75%, 80%, 85%, 90%, 95%, 97%, 98%, 99%, 99.5%, 99.6%, 99.7%, 99.8%, or 99.9% sequence identity to the sequence of SEQ ID NO: 3546; and (iii) a third polypeptide comprising a sequence having at least 50%, 55%, 60%, 65%, 70%, 75%, 80%, 85%, 90%, 95%, 97%, 98%, 99%, 99.5%, 99.6%, 99.7%, 99.8%, or 99.9% sequence identity to the sequence of SEQ ID NO: 3518.

[0811] In some embodiments, the multifunctional polypeptide molecule comprises: (i) a first polypeptide comprising the sequence of SEQ ID NO: 3517; (ii) a second polypeptide comprising the sequence of SEQ ID NO: 3546; and (iii) a third polypeptide comprising to the sequence of SEQ ID NO: 3518.

[0812] In some embodiments, the multifunctional polypeptide molecule comprises: (i) a first polypeptide comprising a sequence having at least 50%, 55%, 60%, 65%, 70%, 75%, 80%, 85%, 90%, 95%, 97%, 98%, 99%, 99.5%, 99.6%, 99.7%, 99.8%, or 99.9% sequence identity to the sequence of SEQ ID NO: 3530 and a sequence having at least 50%, 55%, 60%, 65%, 70%, 75%, 80%, 85%, 90%, 95%, 97%, 98%, 99%, 99.5%, 99.6%, 99.7%, 99.8%, or 99.9% sequence identity to the sequence of SEQ ID NO: 3537; and (ii) a second polypeptide comprising a sequence having at least 50%, 55%, 60%, 65%, 70%, 75%, 80%, 85%, 90%, 95%, 97%, 98%, 99%, 99.5%, 99.6%, 99.7%, 99.8%, or 99.9% sequence identity to the sequence of SEQ ID NO: 3527, a sequence having at least 50%, 55%, 60%, 65%, 70%, 75%, 80%, 85%, 90%, 95%, 97%, 98%, 99%, 99.5%, 99.6%, 99.7%, 99.8%, or 99.9% sequence identity to the sequence of SEQ ID NO: 3528, and a sequence having at least 50%, 55%, 60%, 65%, 70%, 75%, 80%, 85%, 90%, 95%, 97%, 98%, 99%, 99.5%, 99.6%, 99.7%, 99.8%, or 99.9% sequence identity to the sequence of SEQ ID NO: 2191.

[0813] In some embodiments, the multifunctional polypeptide molecule comprises: (i) a first polypeptide comprising the sequence of SEQ ID NO: 3530 and the sequence of SEQ ID NO: 3537; and (ii) a second polypeptide comprising the sequence of SEQ ID NO: 3527, the sequence of SEQ ID NO: 3528, and the sequence of SEQ ID NO: 2191.

[0814] In some embodiments, the multifunctional polypeptide molecule comprises: (i) a first polypeptide comprising, from the N-terminus to the C-terminus, a sequence having at least 50%, 55%, 60%, 65%, 70%, 75%, 80%, 85%, 90%, 95%, 97%, 98%, 99%, 99.5%, 99.6%, 99.7%, 99.8%, or 99.9% sequence identity to the sequence of SEQ ID NO: 3530 operatively linked to a sequence having at least 50%, 55%, 60%, 65%, 70%, 75%, 80%, 85%, 90%, 95%, 97%, 98%, 99%, 99.5%, 99.6%, 99.7%, 99.8%, or 99.9% sequence identity to the sequence of SEQ ID NO: 3537; and (ii) a second polypeptide comprising, from the N-terminus to the C-terminus, a sequence having at least 50%, 55%, 60%, 65%, 70%, 75%, 80%, 85%, 90%, 95%, 97%, 98%, 99%, 99.5%, 99.6%, 99.7%, 99.8%, or 99.9% sequence identity to the sequence of SEQ ID NO: 3527 operatively linked to a sequence having at least 50%, 55%, 60%, 65%, 70%, 75%, 80%, 85%, 90%, 95%, 97%, 98%, 99%, 99.5%, 99.6%, 99.7%, 99.8%, or 99.9% sequence identity to the sequence of SEQ ID NO: 3528 operatively linked to a sequence having at least 50%, 55%, 60%, 65%, 70%, 75%, 80%, 85%, 90%, 95%, 97%, 98%, 99%, 99.5%, 99.6%, 99.7%, 99.8%, or 99.9% sequence identity to the sequence of SEQ ID NO: 2191.

[0815] In some embodiments, the multifunctional polypeptide molecule comprises: (i) a first polypeptide comprising, from the N-terminus to the C-terminus, the sequence of SEQ ID NO: 3530 operatively linked to the sequence of SEQ ID NO: 3537; and (ii) a second polypeptide comprising, from the N-terminus to the C-terminus, the sequence of SEQ ID NO: 3527 operatively linked to the sequence of SEQ ID NO: 3528 operatively linked to the sequence of SEQ ID NO: 2191.

[0816] In some embodiments, a sequence having at least 50%, 55%, 60%, 65%, 70%, 75%, 80%, 85%, 90%, 95%, 97%, 98%, 99%, 99.5%, 99.6%, 99.7%, 99.8%, or 99.9% sequence identity to the sequence of SEQ ID NO: 3528 is operatively linked to a sequence having at least 50%, 55%, 60%, 65%, 70%, 75%, 80%, 85%, 90%, 95%, 97%, 98%, 99%, 99.5%, 99.6%, 99.7%, 99.8%, or 99.9% sequence identity to the sequence of SEQ ID NO: 2191 via a sequence having at least 50%, 55%, 60%, 65%, 70%, 75%, 80%, 85%, 90%, 95%, 97%, 98%, 99%, 99.5%, 99.6%, 99.7%, 99.8%, or 99.9% sequence identity to the sequence of SEQ ID NO: 3309.

[0817] In some embodiments, the sequence of SEQ ID NO: 3528 is operatively linked to the sequence of SEQ ID NO: 2191 via the sequence of SEQ ID NO: 3309.

[0818] In some embodiments, the multifunctional polypeptide molecule comprises two first polypeptides and two second polypeptides.

[0819] In some embodiments, the multifunctional polypeptide molecule comprises: (i) a first polypeptide comprising a sequence having at least 50%, 55%, 60%, 65%, 70%, 75%, 80%, 85%, 90%, 95%, 97%, 98%, 99%, 99.5%, 99.6%, 99.7%, 99.8%, or 99.9% sequence identity to the sequence of SEQ ID NO: 3536; and (ii) a second polypeptide comprising a sequence having at least 50%, 55%, 60%, 65%, 70%, 75%, 80%, 85%, 90%, 95%, 97%, 98%, 99%, 99.5%, 99.6%, 99.7%, 99.8%, or 99.9% sequence identity to the sequence of SEQ ID NO: 3535.

[0820] In some embodiments, the multifunctional polypeptide molecule comprises: (i) a first polypeptide comprising the sequence of SEQ ID NO: 3536; and (ii) a second polypeptide comprising the sequence of SEQ ID NO: 3535.

[0821] In some embodiments, the multifunctional polypeptide molecule comprises: (i) a first polypeptide comprising one or more components as listed in Table 15; and (ii) a second polypeptide comprising one or more components as listed in Table 15. In some embodiments, the multifunctional polypeptide molecule further comprises: (i) a third polypeptide comprising one or more components as listed in Table 15; and (ii) a fourth polypeptide comprising one or more components as listed in Table 15.

[0822] In some embodiments, the multifunctional polypeptide molecule comprises: (i) a first polypeptide comprising one or more components comprising a sequence having at least 50%, 55%, 60%, 65%, 70%, 75%, 80%, 85%, 90%, 95%, 97%, 98%, 99%, 99.5%, 99.6%, 99.7%, 99.8%, or 99.9% sequence identity to any one of the component sequences as listed in Table 15; and (ii) a second polypeptide comprising one or more components comprising a sequence having at least 50%, 55%, 60%, 65%, 70%, 75%, 80%, 85%, 90%, 95%, 97%, 98%, 99%, 99.5%, 99.6%, 99.7%, 99.8%, or 99.9% sequence identity to any one of the component sequences as listed in Table 15. In some embodiments, the multifunctional polypeptide molecule further comprises: (i) a third polypeptide comprising one or more components comprising a sequence having at least 50%, 55%, 60%, 65%, 70%, 75%, 80%, 85%, 90%, 95%, 97%, 98%, 99%, 99.5%, 99.6%, 99.7%, 99.8%, or 99.9% sequence identity to any one of the component sequences as listed in Table 15; and (ii) a fourth polypeptide comprising one or more components comprising a sequence having at least 50%, 55%, 60%, 65%, 70%, 75%, 80%, 85%, 90%, 95%, 97%, 98%, 99%, 99.5%, 99.6%, 99.7%, 99.8%, or 99.9% sequence identity to any one of the component sequences as listed in Table 15.

[0823] In some embodiments, the multifunctional polypeptide molecule comprises: (i) a first polypeptide comprising one or more component sequences as listed in Table 15; and (ii) a second polypeptide comprising one or more component sequences as listed in Table 15. In some embodiments, the multifunctional polypeptide molecule further comprises: (i) a third polypeptide comprising one or more component sequences as listed in Table 15; and (ii) a fourth polypeptide comprising one or more component sequences as listed in Table 15.

[0824] In some embodiments, the multifunctional polypeptide molecule comprises: (i) a first polypeptide comprising an amino acid sequence having at least 50%, 55%, 60%, 65%, 70%, 75%, 80%, 85%, 90%, 95%, 97%, 98%, 99%, 99.5%, 99.6%, 99.7%, 99.8%, or 99.9% sequence identity to any one of the polypeptide sequences as listed in Table 15; and (ii) a second polypeptide comprising an amino acid sequence having at least 50%, 55%, 60%, 65%, 70%, 75%, 80%, 85%, 90%, 95%, 97%, 98%, 99%, 99.5%, 99.6%, 99.7%, 99.8%, or 99.9% sequence identity to any one of the polypeptide sequences as listed in Table 15. In some embodiments, the multifunctional polypeptide molecule further comprises: (i) a third polypeptide comprising an amino acid sequence having at least 50%, 55%, 60%, 65%, 70%, 75%, 80%, 85%, 90%, 95%, 97%, 98%, 99%, 99.5%, 99.6%, 99.7%, 99.8%, or 99.9% sequence identity to any one of the polypeptide sequences as listed in Table 15; and (ii) a fourth polypeptide comprising an amino acid sequence having at least 50%, 55%, 60%, 65%, 70%, 75%, 80%, 85%, 90%, 95%, 97%, 98%, 99%, 99.5%, 99.6%, 99.7%, 99.8%, or 99.9% sequence identity to any one of the polypeptide sequences as listed in Table 15.

[0825] In some embodiments, the multifunctional polypeptide molecule comprises: (i) a first polypeptide comprising any one of the polypeptide sequences as listed in Table 15; and (ii) a second polypeptide comprising any one of the polypeptide sequences as listed in Table 15. In some embodiments, the multifunctional polypeptide molecule further comprises: (i) a third polypeptide comprising any one of the polypeptide sequences as listed in Table 15; and (ii) a fourth polypeptide comprising one or more comprising any one of the polypeptide sequences as listed in Table 15.

[0826] In another aspect, described herein is an antibody comprising an anti-T cell receptor beta variable chain (TCRβV) binding domain comprising: (i) a heavy chain variable region (VH) comprising a heavy chain complementarity determining region 1 (HC CDR1), a heavy chain complementarity determining region 2 (HC CDR2), and a heavy chain complementarity determining region 3 (HC CDR3) comprising an amino acid sequence having at least 50%, 55%, 60%, 65%, 70%, 75%, 80%, 85%, 90%, 95%, 97%, 98%, 99%, 99.5%, 99.6%, 99.7%, 99.8%, or 99.9% sequence identity to SEQ ID NO: 3650, SEQ ID NO: 3651, and SEQ ID NO: 5, respectively; (ii) a light chain variable region (VL) comprising a light chain complementarity determining region 1 (LC CDR1), a light chain complementarity determining region 2 (LC CDR2), and a light chain complementarity determining region 3 (LC CDR3) comprising an amino acid sequence having at least 50%, 55%, 60%, 65%, 70%, 75%, 80%, 85%, 90%, 95%, 97%, 98%, 99%, 99.5%, 99.6%, 99.7%, 99.8%, or 99.9% sequence identity to SEQ ID NO: 3655, SEQ ID NO: 3653, and SEQ ID NO: 8, respectively; or (iii) a combination thereof.

[0827] In some embodiments, the TCRβV binding domain comprising: (i) a VH comprising a HC CDR1, a HC CDR2, and a HC CDR3 comprising the amino acid sequence of SEQ ID NO: 3650, SEQ ID NO: 3651, and SEQ ID NO: 5, respectively; (ii) a VL comprising a LC CDR1, a LC CDR2, and a LC CDR3 comprising the amino acid sequence of SEQ ID NO: 3655, SEQ ID NO: 3653, and SEQ ID NO: 8, respectively; or (iii) a combination thereof.

[0828] In some embodiments, the TCRβV binding domain comprising: (i) a VH comprising an amino acid sequence having at least 50%, 55%, 60%, 65%, 70%, 75%, 80%, 85%, 90%, 95%, 97%, 98%, 99%, 99.5%, 99.6%, 99.7%, 99.8%, or 99.9% sequence identity to SEQ ID NO: 1346; (ii) a VL comprising an amino acid sequence having at least 50%, 55%, 60%, 65%, 70%, 75%, 80%, 85%, 90%, 95%, 97%, 98%, 99%, 99.5%, 99.6%, 99.7%, 99.8%, or 99.9% sequence identity to SEQ ID NO: 1349; or (iii) a combination thereof.

[0829] In some embodiments, the TCRβV binding domain comprising: (i) a VH comprising the amino acid sequence of SEQ ID NO: 1346; (ii) a VL comprising the amino acid sequence of SEQ ID NO: 1349; or (iii) a combination thereof.

[0830] In some embodiments, the antibody comprising an anti-T cell receptor beta variable chain (TCRβV) binding domain further comprises a cytokine polypeptide or a functional fragment or a functional variant thereof. In some embodiments, the cytokine polypeptide may be IL-2, IL2-C125A. IL-15, IL-7, IL-12, or IL-21. In embodiments, the cytokine polypeptide may further comprise a cytokine receptor. In some embodiments, the cytokine polypeptide may comprise IL-15 linked to a IL-15Ra. In some embodiments, the cytokine polypeptide may comprise IL-15 linked to a IL-15Ra sushi domain. In some embodiments, the cytokine polypeptide may comprise a cytokine dimer. In some embodiments, the cytokine polypeptide may comprise an IL-12 beta subunit linked to an IL-12 alpha subunit.

TABLE 1
Amino acid and nucleotide sequences for murine, chimeric and humanized antibody
molecules which bind to TCRVB 6, e.g., TCRVB 6-5. The antibody molecules include murine
mAb Antibody A, and humanized mAb Antibody A-H Clones A-H.1 to A-H.85. The amino acid
the heavy and light chain CDRs, and the amino acid and nucleotide sequences of the heavy
and light chain variable regions, and the heavy and light chains are shown.
Antibody A (murine), also referred to as H131, TCRVB 6-5 binder

| | | |
|---|---|---|
| SEQ ID NO: 3 | HC CDR1 | GYSFTTYYIH |
| | (Combined) | |
| SEQ ID NO: 4 | HC CDR2 | WFFPGSGNIKYNEKFKG |
| | (Combined) | |
| SEQ ID NO: 5 | HC CDR3 | SYYSYDVLDY |
| | (Combined) | |
| SEQ ID NO: | HC CDR1 (Kabat) | TYYIH |
| 45 | | |
| SEQ ID NO: | HC CDR2 (Kabat) | WFFPGSGNIKYNEKFKG |
| 46 | | |
| SEQ ID NO: | HC CDR3 (Kabat) | SYYSYDVLDY |
| 47 | | |
| SEQ ID | HC CDR1 (Chothia) | GYSFTTY |
| NO: 48 | | |
| SEQ ID NO: | HC CDR2 (Chothia) | FPGSGN |
| 49 | | |
| SEQ ID NO: | HC CDR3 (Chothia) | SYYSYDVLDY |
| 50 | | |
| SEQ ID NO: 1 | VH | QVQLQQSGPELVKPGTSVKISCKASGYSFTTYYIHWVK |
| | | QRPGQGLEWIGWFFPGSGNIKYNEKFKGKATLTADTSS |
| | | STAYMQLSSLTSEESAVYFCAGSYYSYDVLDYWGHGT |
| | | TLTVSS |
| SEQ ID NO: 6 | LC CDR1 | KASQNVGINVV |
| | (Combined) | |
| SEQ ID NO: 7 | LC CDR2 | SSSHRYS |
| | (Combined) | |
| SEQ ID NO: 8 | LC CDR3 | QQFKSYPLT |
| | (Combined) | |
| SEQ ID NO: | LC CDR1 (Kabat) | KASQNVGINVV |
| 51 | | |
| SEQ ID NO: | LC CDR2 (Kabat) | SSSHRYS |
| 52 | | |
| SEQ ID NO: | LC CDR3 (Kabat) | QQFKSYPLT |
| 53 | | |
| SEQ ID NO: | LC CDR1 (Chothia) | KASQNVGINVV |
| 54 | | |
| SEQ ID NO: | LC CDR2 (Chothia) | SSSHRYS |
| 55 | | |
| SEQ ID NO: | LC CDR3 (Chothia) | QQFKSYPLT |
| 56 | | |
| SEQ ID NO: 2 | VL | DILMTQSQKFMSTSLGDRVSVSCKASQNVGINVVWHQ |
| | | QKPGQSPKALIYSSSHRYSGVPDRFTGSGSGTDFTLTIN |
| | | NVQSEDLAEYFCQQFKSYPLTFGAGTKLELK |

Antibody A humanized (A-H antibody), TCRVB 6-5 binder
A-H.1 antibody (also referred to as BHM1709)

| | | |
|---|---|---|
| SEQ ID NO: 3 | HC CDR1 | GYSFTTYYIH |
| | (Combined) | |
| SEQ ID NO: 4 | HC CDR2 | WFFPGSGNIKYNEKFKG |
| | (Combined) | |
| SEQ ID NO: 5 | HC CDR3 | SYYSYDVLDY |
| | (Combined) | |
| SEQ ID NO: 9 | VH | QVQLVQSGAEVKKPGSSVKVSCKASGYSFTTYYIHWV |
| | | RQAPGQGLEWMGWFFPGSGNIKYNEKFKGRVTITADT |
| | | STSTAYMELSSLRSEDTAVYYCAGSYYSYDVLDYWGQ |
| | | GTTVTVSS |
| SEQ ID NO: | DNA VH | CAGGTGCAGCTGGTTCAGTCTGGCGCCGAAGTGAAG |
| 12 | | AAACCTGGCTCCTCCGTGAAGGTGTCCTGCAAGGCTT |
| | | CCGGCTACTCCTTCACCACCTACTACATCCACTGGGT |
| | | CCGACAGGCCCCTGGACAAGGATTGGAATGGATGGG |
| | | CTGGTTCTTCCCCGGCTCCGGCAACATCAAGTACAAC |
| | | GAGAAGTTCAAGGGCCGCGTGACCATCACCGCCGAC |
| | | ACCTCTACCTCTACCGCCTACATGGAACTGTCCAGCC |
| | | TGAGATCTGAGGACACCGCCGTGTACTACTGCGCCG |
| | | GCTCCTACTACTCTTACGACGTGCTGGATTACTGGGG |
| | | CCAGGGCACCACAGTGACAGTGTCCTCT |
| SEQ ID NO: | VH-IgM constant | METDTLLLWVLLLWVPGSTGQVQLVQSGAEVKKPGSS |
| 69 | delta CDC | VKVSCKASGYSFTTYYIHWVRQAPGQGLEWMGWFFPG |
| | | SGNIKYNEKFKGRVTITADTSTSTAYMELSSLRSEDTAV |
| | | YYCAGSYYSYDVLDYWGQGTTVTVSSGSASAPTLFPL |
| | | VSCENSPSDTSSVAVGCLAQDFLPDSITFSWKYKNNSDI |
| | | SSTRGFPSVLRGGKYAATSQVLLPSKDVMQGTDEHVV |
| | | CKVQHPNGNKEKNVPLPVIAELPPKVSVFVPPRDGFFG |
| | | NPRKSKLICQATGFSPRQIQVSWLREGKQVGSGVTTDQ |
| | | VQAEAKESGPTTYKVTSTLTIKESDWLGQSMFTCRVDH |
| | | RGLTFQQNASSMCVPDQDTAIRVFAIPPSFASIFLTKSTK |
| | | LTCLVTDLTTYDSVTISWTRQNGEAVKTHTNISESHPNA |
| | | TFSAVGEASICEDDWNSGERFTCTVTHTDLASSLKQTIS |
| | | RPKGVALHRPDVYLLPPAREQLNLRESATITCLVTGFSP |
| | | ADVFVQWMQRGQPLSPEKYVTSAPMPEPQAPGRYFAH |
| | | SILTVSEEEWNTGETYTCVVAHEALPNRVTERTVDKST |
| | | GKPTLYNVSLVMSDTAGTCY |
| SEQ ID NO: | VH-IgGA1 | METDTLLLWVLLLWVPGSTGQVQLVQSGAEVKKPGSS |
| 70 | | VKVSCKASGYSFTTYYIHWVRQAPGQGLEWMGWFFPG |
| | | SGNIKYNEKFKGRVTITADTSTSTAYMELSSLRSEDTAV |
| | | YYCAGSYYSYDVLDYWGQGTTVTVSSASPTSPKVFPLS |
| | | LCSTQPDGNVVIACLVQGFFPQEPLSVTWSESGQGVTA |
| | | RNFPPSQDASGDLYTTSSQLTLPATQCLAGKSVTCHVK |
| | | HYTNPSQDVTVPCPVPSTPPTPSPSTPPTPSPSCCHPRLSL |
| | | HRPALEDLLLGSEANLTCTLTGLRDASGVTFTWTPSSG |
| | | KSAVQGPPERDLCGCYSVSSVLPGCAEPWNHGKTFTCT |
| | | AAYPESKTPLTATLSKSGNTFRPEVHLLPPPSEELALNEL |
| | | VTLTCLARGFSPKDVLVRWLQGSQELPREKYLTWASR |
| | | QEPSQGTTTFAVTSILRVAAEDWKKGDTFSCMVGHEAL |
| | | PLAFTQKTIDRLAGKPTHVNVSVVMAEVDGTCY |
| SEQ ID NO: | VH-IgGA2 | METDTLLLWVLLLWVPGSTGQVQLVQSGAEVKKPGSS |
| 71 | | VKVSCKASGYSFTTYYIHWVRQAPGQGLEWMGWFFPG |
| | | SGNIKYNEKFKGRVTITADTSTSTAYMELSSLRSEDTAV |
| | | YYCAGSYYSYDVLDYWGQGTTVTVSSASPTSPKVFPLS |
| | | LDSTPQDGNVVVACLVQGFFPQEPLSVTWSESGQNVTA |
| | | RNFPPSQDASGDLYTTSSQLTLPATQCPDGKSVTCHVK |
| | | HYTNSSQDVTVPCRVPPPPPCCHPRLSLHRPALEDLLLG |
| | | SEANLTCTLTGLRDASGATFTWTPSSGKSAVQGPPERD |
| | | LCGCYSVSSVLPGCAQPWNHGETFTCTAAHPELKTPLT |
| | | ANITKSGNTFRPEVHLLPPPSEELALNELVTLTCLARGFS |
| | | PKDVLVRWLQGSQELPREKYLTWASRQEPSQGTTTYA |
| | | VTSILRVAAEDWKKGETFSCMVGHEALPLAFTQKTIDR |
| | | MAGKPTHINVSVVMAEADGTCY |
| SEQ ID NO: | Heavy chain | METDTLLLWVLLLWVPGSTGQVQLVQSGAEVKKPGSS |
| 3278 | | VKVSCKASGYSFTTYYIHWVRQAPGQGLEWMGWFFPG |
| | | SGNIKYNEKFKGRVTITADTSTSTAYMELSSLRSEDTAV |
| | | YYCAGSYYSYDVLDYWGQGTTVTVSSASTKGPSVFPL |
| | | APSSKSTSGGTAALGCLVKDYFPEPVTVSWNSGALTSG |
| | | VHTFPAVLQSSGLYSLSSVVTVPSSSLGTQTYICNVNHK |
| | | PSNTKVDKRVEPKSCDKTHTCPPCPAPELLGGPSVFLFP |
| | | PKPKDTLMISRTPEVTCVVVDVSHEDPEVKFNWYVDG |
| | | VEVHNAKTKPREEQYNSTYRVVSVLTVLHQDWLNGKE |
| | | YKCKVSNKALPAPIEKTISKAKGQPREPQVYTLPPSREE |
| | | MTKNQVSLTCLVKGFYPSDIAVEWESNGQPENNYKTTP |
| | | PVLDSDGSFFLYSKLTVDKSRWQQGNVFSCSVMHEAL |
| | | HNHYTQKSLSLSPGK |
| SEQ ID NO: 6 | LC CDR1 | KASQNVGINVV |
| | (Combined) | |
| SEQ ID NO: 7 | LC CDR2 | SSSHRYS |
| | (Combined) | |
| SEQ ID NO: 8 | LC CDR3 | QQFKSYPLT |
| | (Combined) | |
| SEQ ID NO: | VL | DIQMTQSPSFLSASVGDRVTITCKASQNVGINVVWHQQ |
| 10 | | KPGKAPKALIYSSSHRYSGVPSRFSGSGSGTEFTLTISSL |
| | | QPEDFATYFCQQFKSYPLTFGQGTKLEIK |
| SEQ ID NO: | DNA VL | GACATCCAGATGACCCAGTCTCCATCCTTCCTGTCCG |
| 13 | | CCTCTGTGGGCGACAGAGTGACCATCACATGCAAGG |
| | | CCTCTCAGAACGTGGGCATCAACGTCGTGTGGCACCA |
| | | GCAGAAGCCTGGCAAGGCTCCTAAGGCTCTGATCTA |
| | | CTCCTCCAGCCACCGGTACTCTGGCGTGCCCTCTAGA |
| | | TTTTCCGGCTCTGGCTCTGGCACCGAGTTTACCCTGA |
| | | CAATCTCCAGCCTGCAGCCTGAGGACTTCGCCACCTA |
| | | CTTTTGCCAGCAGTTCAAGAGCTACCCTCTGACCTTT |
| | | GGCCAGGGCACCAAGCTGGAAATCAAG |
| SEQ ID NO: | VL and kappa | METDTLLLWVLLLWVPGSTGDIQMTQSPSFLSASVGDR |
| 72 | constant region/light | VTITCKASQNVGINVVWHQQKPGKAPKALIYSSSHRYS |
| | chain | GVPSRFSGSGSGTEFTLTISSLQPEDFATYFCQQFKSYPL |
| | | TFGQGTKLEIKRTVAAPSVFIFPPSDEQLKSGTASVVCLL |
| | | NNFYPREAKVQWKVDNALQSGNSQESVTEQDSKDSTY |
| | | SLSSTLTLSKADYEKHKVYACEVTHQGLSSPVTKSFNR |
| | | GEC |

A-H.2 antibody (also referred to as BHM1710)

| | | |
|---|---|---|
| SEQ ID NO: 3 | HC CDR1 | GYSFTTYYIH |
| | (Combined) | |
| SEQ ID NO: 4 | HC CDR2 | WFFPGSGNIKYNEKFKG |
| | (Combined) | |
| SEQ ID NO: 5 | HC CDR3 | SYYSYDVLDY |
| | (Combined) | |
| SEQ ID NO: 9 | VH | QVQLVQSGAEVKKPGSSVKVSCKASGYSFTTYYIHWV |
| | | RQAPGQGLEWMGWFFPGSGNIKYNEKFKGRVTITADT |
| | | STSTAYMELSSLRSEDTAVYYCAGSYYSYDVLDYWGQ |
| | | GTTVTVSS |
| SEQ ID NO: | DNA VH | CAGGTGCAGCTGGTTCAGTCTGGCGCCGAAGTGAAG |
| 12 | | AAACCTGGCTCCTCCGTGAAGGTGTCCTGCAAGGCTT |
| | | CCGGCTACTCCTTCACCACCTACTACATCCACTGGGT |
| | | CCGACAGGCCCCTGGACAAGGATTGGAATGGATGGG |
| | | CTGGTTCTTCCCCGGCTCCGGCAACATCAAGTACAAC |
| | | GAGAAGTTCAAGGGCCGCGTGACCATCACCGCCGAC |
| | | ACCTCTACCTCTACCGCCTACATGGAACTGTCCAGCC |
| | | TGAGATCTGAGGACACCGCCGTGTACTACTGCGCCG |
| | | GCTCCTACTACTCTTACGACGTGCTGGATTACTGGGG |
| | | CCAGGGCACCACAGTGACAGTGTCCTCT |
| SEQ ID NO: | Heavy chain | METDTLLLWVLLLWVPGSTGQVQLVQSGAEVKKPGSS |
| 3278 | | VKVSCKASGYSFTTYYIHWVRQAPGQGLEWMGWFFPG |
| | | SGNIKYNEKFKGRVTITADTSTSTAYMELSSLRSEDTAV |
| | | YYCAGSYYSYDVLDYWGQGTTVTVSSASTKGPSVFPL |
| | | APSSKSTSGGTAALGCLVKDYFPEPVTVSWNSGALTSG |
| | | VHTFPAVLQSSGLYSLSSVVTVPSSSLGTQTYICNVNHK |
| | | PSNTKVDKRVEPKSCDKTHTCPPCPAPELLGGPSVFLFP |
| | | PKPKDTLMISRTPEVTCVVVDVSHEDPEVKFNWYVDG |
| | | VEVHNAKTKPREEQYNSTYRVVSVLTVLHQDWLNGKE |
| | | YKCKVSNKALPAPIEKTISKAKGQPREPQVYTLPPSREE |
| | | MTKNQVSLTCLVKGFYPSDIAVEWESNGQPENNYKTTP |
| | | PVLDSDGSFFLYSKLTVDKSRWQQGNVFSCSVMHEAL |
| | | HNHYTQKSLSLSPGK |
| SEQ ID NO: 6 | LC CDR1 | KASQNVGINVV |
| | (Combined) | |
| SEQ ID NO: 7 | LC CDR2 | SSSHRYS |
| | (Combined) | |
| SEQ ID NO: 8 | LC CDR3 | QQFKSYPLT |
| | (Combined) | |
| SEQ ID NO: | VL | DIQMTQSPSSLSASVGDRVTITCKASQNVGINVVWHQQ |
| 11 | | KPGKVPKALIYSSSHRYSGVPSRFSGSGSGTDFTLTISSL |
| | | QPEDVATYFCQQFKSYPLTFGQGTKLEIK |
| SEQ ID NO: | DNA VL | GACATCCAGATGACCCAGTCTCCATCCTCTCTGTCCG |
| 14 | | CCTCTGTGGGCGACAGAGTGACCATCACATGCAAGG |
| | | CCTCTCAGAACGTGGGCATCAACGTCGTGTGGCACCA |
| | | GCAGAAACCTGGCAAGGTGCCCAAGGCTCTGATCTA |
| | | CTCCTCCAGCCACAGATACTCCGGCGTGCCCTCTAGA |
| | | TTCTCCGGCTCTGGCTCTGGCACCGACTTTACCCTGA |
| | | CAATCTCCAGCCTGCAGCCTGAGGACGTGGCCACCTA |
| | | CTTTTGCCAGCAGTTCAAGAGCTACCCTCTGACCTTT |
| | | GGCCAGGGCACCAAGCTGGAAATCAAG |
| SEQ ID NO: | Light chain | METDTLLLWVLLLWVPGSTGDIQMTQSPSSLSASVGDR |
| 3279 | | VTITCKASQNVGINVVWHQQKPGKVPKALIYSSSHRYS |
| | | GVPSRFSGSGSGTDFTLTISSLQPEDVATYFCQQFKSYPL |
| | | TFGQGTKLEIKRTVAAPSVFIFPPSDEQLKSGTASVVCLL |
| | | NNFYPREAKVQWKVDNALQSGNSQESVTEQDSKDSTY |
| | | SLSSTLTLSKADYEKHKVYACEVTHQGLSSPVTKSFNR |
| | | GEC |

A-H.3 antibody

| | | |
|---|---|---|
| SEQ ID NO: | VH + VL | QVQLVQSGAEVKKPGSSVKVSCKASGTDFKLTYIHWV |
| 80 | | RQAPGQGLEWMGRVSPGSGNTKYNEKFKGRVTITADT |
| | | STSTAYMELSSLRSEDTAVYYCAGSYYSYDVLDYWGQ |
| | | GTTVTVSSGGGGSGGGGSGGGGSGGGGSDIQMTQSPSF |
| | | LSASVGDRVTITCKASQNVEDRVAWYQQKPGKAPKAL |
| | | IYSSSHRYKGVPSRFSGSGSGTEFTLTISSLQPEDFATYFC |
| | | QQFKSYPLTFGQGTKLEIK |
| SEQ ID NO: | VL | DIQMTQSPSFLSASVGDRVTITCKASQNVEDRVAWYQQ |
| 81 | | KPGKAPKALIYSSSHRYKGVPSRFSGSGSGTEFTLTISSL |
| | | QPEDFATYFCQQFKSYPLTFGQGTKLEIK |
| SEQ ID NO: | VH | QVQLVQSGAEVKKPGSSVKVSCKASGTDFKLTYIHWV |
| 82 | | RQAPGQGLEWMGRVSPGSGNTKYNEKFKGRVTITADT |
| | | STSTAYMELSSLRSEDTAVYYCAGSYYSYDVLDYWGQ |
| | | GTTVTVSS |

A-H.4

| | | |
|---|---|---|
| SEQ ID NO: | VH + VL | QVQLVQSGAEVKKPGSSVKVSCKASGTDFDKIYIHWVR |
| 83 | | QAPGQGLEWMGRISAGSGNVKYNEKFKGRVTITADTS |
| | | TSTAYMELSSLRSEDTAVYYCAGSYYSYDVLDYWGQG |
| | | TTVTVSSGGGGSGGGGSGGGGSGGGGSDIQMTQSPSFL |
| | | SASVGDRVTITCKASQNVEDRVAWYQQKPGKAPKALI |
| | | YSSSHRYKGVPSRFSGSGSGTEFTLTISSLQPEDFATYFC |
| | | QQFKSYPLTFGQGTKLEIK |
| SEQ ID NO: | VL | DIQMTQSPSFLSASVGDRVTITCKASQNVEDRVAWYQQ |
| 84 | | KPGKAPKALIYSSSHRYKGVPSRFSGSGSGTEFTLTISSL |
| | | QPEDFATYFCQQFKSYPLTFGQGTKLEIK |
| SEQ ID NO: | VH | QVQLVQSGAEVKKPGSSVKVSCKASGTDFDKIYIHWVR |
| 85 | | QAPGQGLEWMGRISAGSGNVKYNEKFKGRVTITADTS |
| | | TSTAYMELSSLRSEDTAVYYCAGSYYSYDVLDYWGQG |
| | | TTVTVSS |

A-H.5

| | | |
|---|---|---|
| SEQ ID NO: | VH + VL | QVQLVQSGAEVKKPGSSVKVSCKASGHDFRDFYIHWV |
| 86 | | RQAPGQGLEWMGRVYPGSGSYRYNEKFKGRVTITADT |
| | | STSTAYMELSSLRSEDTAVYYCAGSYYSYDVLDYWGQ |
| | | GTTVTVSSGGGGSGGGGSGGGGSGGGGSDIQMTQSPSF |
| | | LSASVGDRVTITCKASQNVDDRVAWYQQKPGKAPKAL |
| | | IYSSSHRYKGVPSRFSGSGSGTEFTLTISSLQPEDFATYFC |
| | | QQFKSYPLTFGQGTKLEIK |
| SEQ ID NO: | VL | DIQMTQSPSFLSASVGDRVTITCKASQNVDDRVAWYQQ |
| 87 | | KPGKAPKALIYSSSHRYKGVPSRFSGSGSGTEFTLTISSL |
| | | QPEDFATYFCQQFKSYPLTFGQGTKLEIK |
| SEQ ID NO: | VH | QVQLVQSGAEVKKPGSSVKVSCKASGHDFRDFYIHWV |
| 88 | | RQAPGQGLEWMGRVYPGSGSYRYNEKFKGRVTITADT |
| | | STSTAYMELSSLRSEDTAVYYCAGSYYSYDVLDYWGQ |
| | | GTTVTVSS |

A-H.6

| | | |
|---|---|---|
| SEQ ID NO: | VH + VL | QVQLVQSGAEVKKPGSSVKVSCKASGHDFKLTYIHWV |
| 89 | | RQAPGQGLEWMGRISAGSGNVKYNEKFKGRVTITADT |
| | | STSTAYMELSSLRSEDTAVYYCAGSYYSYDVLDYWGQ |
| | | GTTVTVSSGGGGSGGGGSGGGGSGGGGSDIQMTQSPSF |
| | | LSASVGDRVTITCKASQNVDNRVAWYQQKPGKAPKAL |
| | | IYSSSHRYKGVPSRFSGSGSGTEFTLTISSLQPEDFATYFC |
| | | QQFKSYPLTFGQGTKLEIK |
| SEQ ID NO: | VL | DIQMTQSPSFLSASVGDRVTITCKASQNVDNRVAWYQQ |
| 90 | | KPGKAPKALIYSSSHRYKGVPSRFSGSGSGTEFTLTISSL |
| | | QPEDFATYFCQQFKSYPLTFGQGTKLEIK |
| SEQ ID NO: | VH | QVQLVQSGAEVKKPGSSVKVSCKASGHDFKLTYIHWV |
| 91 | | RQAPGQGLEWMGRISAGSGNVKYNEKFKGRVTITADT |
| | | STSTAYMELSSLRSEDTAVYYCAGSYYSYDVLDYWGQ |
| | | GTTVTVSS |

A-H.7

| | | |
|---|---|---|
| SEQ ID NO: | VH + VL | QVQLVQSGAEVKKPGSSVKVSCKASGTDFKLTYIHWV |
| 92 | | RQAPGQGLEWMGRIFPGSGNVKYNEKFKGRVTITADTS |
| | | TSTAYMELSSLRSEDTAVYYCAGSYYSYDVLDYWGQG |
| | | TTVTVSSGGGGSGGGGSGGGGSGGGGSDIQMTQSPSFL |
| | | SASVGDRVTITCKASQNVENKVAWHQQKPGKAPKALI |
| | | YSSSHRYKGVPSRFSGSGSGTEFTLTISSLQPEDFATYFC |
| | | QQFKSYPLTFGQGTKLEIK |
| SEQ ID NO: | VL | DIQMTQSPSFLSASVGDRVTITCKASQNVENKVAWHQQ |
| 93 | | KPGKAPKALIYSSSHRYKGVPSRFSGSGSGTEFTLTISSL |
| | | QPEDFATYFCQQFKSYPLTFGQGTKLEIK |
| SEQ ID NO: | VH | QVQLVQSGAEVKKPGSSVKVSCKASGTDFKLTYIHWV |
| 94 | | RQAPGQGLEWMGRIFPGSGNVKYNEKFKGRVTITADTS |
| | | TSTAYMELSSLRSEDTAVYYCAGSYYSYDVLDYWGQG |
| | | TTVTVSS |

A-H.8

| | | |
|---|---|---|
| SEQ ID NO: | VH + VL | QVQLVQSGAEVKKPGSSVKVSCKASGTDFDKIYIHWVR |
| 95 | | QAPGQGLEWMGRIFAGSGNTKYNEKFKGRVTITADTST |
| | | STAYMELSSLRSEDTAVYYCAGSYYSYDVLDYWGQGT |
| | | TVTVSSGGGGSGGGGSGGGGSGGGGSDIQMTQSPSFLS |
| | | ASVGDRVTITCKASQNVDDRVAWYQQKPGKAPKALIY |
| | | SSSHRYKGVPSRFSGSGSGTEFTLTISSLQPEDFATYFCQ |
| | | QFKSYPLTFGQGTKLEIK |
| SEQ ID NO: | VL | DIQMTQSPSFLSASVGDRVTITCKASQNVDDRVAWYQQ |
| 96 | | KPGKAPKALIYSSSHRYKGVPSRFSGSGSGTEFTLTISSL |
| | | QPEDFATYFCQQFKSYPLTFGQGTKLEIK |
| SEQ ID NO: | VH | QVQLVQSGAEVKKPGSSVKVSCKASGTDFDKIYIHWVR |
| 97 | | QAPGQGLEWMGRIFAGSGNTKYNEKFKGRVTITADTST |
| | | STAYMELSSLRSEDTAVYYCAGSYYSYDVLDYWGQGT |
| | | TVTVSS |

A-H.9

| | | |
|---|---|---|
| SEQ ID NO: | VH + VL | QVQLVQSGAEVKKPGSSVKVSCKASGHDFDKFYIHWV |
| 98 | | RQAPGQGLEWMGRVSAGSGNVKYNEKFKGRVTITADT |
| | | STSTAYMELSSLRSEDTAVYYCAGSYYSYDVLDYWGQ |
| | | GTTVTVSSGGGGSGGGGSGGGGSGGGGSDIQMTQSPSF |
| | | LSASVGDRVTITCKASQNVGNRVAWYQQKPGKAPKAL |
| | | IYSSSHRYSGVPSRFSGSGSGTEFTLTISSLQPEDFATYFC |
| | | QQFKSYPLTFGQGTKLEIK |
| SEQ ID NO: | VL | DIQMTQSPSFLSASVGDRVTITCKASQNVGNRVAWYQQ |
| 99 | | KPGKAPKALIYSSSHRYSGVPSRFSGSGSGTEFTLTISSL |
| | | QPEDFATYFCQQFKSYPLTFGQGTKLEIK |
| SEQ ID NO: | VH | QVQLVQSGAEVKKPGSSVKVSCKASGHDFDKFYIHWV |
| 100 | | RQAPGQGLEWMGRVSAGSGNVKYNEKFKGRVTITADT |
| | | STSTAYMELSSLRSEDTAVYYCAGSYYSYDVLDYWGQ |
| | | GTTVTVSS |

A-H.10

| | | |
|---|---|---|
| SEQ ID NO: | VH + VL | QVQLVQSGAEVKKPGSSVKVSCKASGHDFDKFYIHWV |
| 101 | | RQAPGQGLEWMGRIFAGSGNVKYNEKFKGRVTITADT |
| | | STSTAYMELSSLRSEDTAVYYCAGSYYSYDVLDYWGQ |
| | | GTTVTVSSGGGGSGGGGSGGGGSGGGGSDIQMTQSPSF |
| | | LSASVGDRVTITCKASQNVGDRVAWYQQKPGKAPKAL |
| | | IYSSSHRYKGVPSRFSGSGSGTEFTLTISSLQPEDFATYFC |
| | | QQFKSYPLTFGQGTKLEIKs |
| SEQ ID NO: | VL | DIQMTQSPSFLSASVGDRVTITCKASQNVGDRVAWYQQ |
| 102 | | KPGKAPKALIYSSSHRYKGVPSRFSGSGSGTEFTLTISSL |
| | | QPEDFATYFCQQFKSYPLTFGQGTKLEIK |
| SEQ ID NO: | VH | QVQLVQSGAEVKKPGSSVKVSCKASGHDFDKFYIHWV |
| 103 | | RQAPGQGLEWMGRIFAGSGNVKYNEKFKGRVTITADT |
| | | STSTAYMELSSLRSEDTAVYYCAGSYYSYDVLDYWGQ |
| | | GTTVTVSS |

A-H.11

| | | |
|---|---|---|
| SEQ ID NO: | VH + VL | QVQLVQSGAEVKKPGSSVKVSCKASGTDFKLTYIHWV |
| 104 | | RQAPGQGLEWMGRVSPGSGNVKYNEKFKGRVTITADT |
| | | STSTAYMELSSLRSEDTAVYYCAGSYYSYDVLDYWGQ |
| | | GTTVTVSSGGGGSGGGGSGGGGSGGGGSDIQMTQSPSF |
| | | LSASVGDRVTITCKASQNVGDRVAWYQQKPGKAPKAL |
| | | IYSSSHRYKGVPSRFSGSGSGTEFTLTISSLQPEDFATYFC |
| | | QQFKSYPLTFGQGTKLEIK |
| SEQ ID NO: | VL | DIQMTQSPSFLSASVGDRVTITCKASQNVGDRVAWYQQ |
| 105 | | KPGKAPKALIYSSSHRYKGVPSRFSGSGSGTEFTLTISSL |
| | | QPEDFATYFCQQFKSYPLTFGQGTKLEIK |
| SEQ ID NO: | VH | QVQLVQSGAEVKKPGSSVKVSCKASGTDFKLTYIHWV |
| 106 | | RQAPGQGLEWMGRVSPGSGNVKYNEKFKGRVTITADT |
| | | STSTAYMELSSLRSEDTAVYYCAGSYYSYDVLDYWGQ |
| | | GTTVTVSS |

A-H.12

| | | |
|---|---|---|
| SEQ ID NO: | VH + VL | QVQLVQSGAEVKKPGSSVKVSCKASGTDFDKIYIHWVR |
| 107 | | QAPGQGLEWMGRVSAGSGNTKYNEKFKGRVTITADTS |
| | | TSTAYMELSSLRSEDTAVYYCAGSYYSYDVLDYWGQG |
| | | TTVTVSSGGGGSGGGGSGGGGSGGGGSDIQMTQSPSFL |
| | | SASVGDRVTITCKASQNVGNRVAWYQQKPGKAPKALI |
| | | YSSSHRYKGVPSRFSGSGSGTEFTLTISSLQPEDFATYFC |
| | | QQFKSYPLTFGQGTKLEIK |
| SEQ ID NO: | VL | DIQMTQSPSFLSASVGDRVTITCKASQNVGNRVAWYQQ |
| 108 | | KPGKAPKALIYSSSHRYKGVPSRFSGSGSGTEFTLTISSL |
| | | QPEDFATYFCQQFKSYPLTFGQGTKLEIK |
| SEQ ID NO: | VH | QVQLVQSGAEVKKPGSSVKVSCKASGTDFDKIYIHWVR |
| 109 | | QAPGQGLEWMGRVSAGSGNTKYNEKFKGRVTITADTS |
| | | TSTAYMELSSLRSEDTAVYYCAGSYYSYDVLDYWGQG |
| | | TTVTVSS |

A-H.13, also referred to as A-H.69

| | | |
|---|---|---|
| SEQ ID NO: | VH + VL | QVQLVQSGAEVKKPGSSVKVSCKASGTDFKLTYIHWV |
| 110 | | RQAPGQGLEWMGRIFPGSGNVKYNEKFKGRVTITADTS |
| | | TSTAYMELSSLRSEDTAVYYCAGSYYSYDVLDYWGQG |
| | | TTVTVSSGGGGSGGGGSGGGGSGGGGSDIQMTQSPSFL |
| | | SASVGDRVTITCKASQNVDNRVAWYQQKPGKAPKALI |
| | | YSSSHRYKGVPSRFSGSGSGTEFTLTISSLQPEDFATYFC |
| | | QQFKSYPLTFGQGTKLEIK |
| SEQ ID NO: | VL | DIQMTQSPSFLSASVGDRVTITCKASQNVDNRVAWYQQ |
| 111 | | KPGKAPKALIYSSSHRYKGVPSRFSGSGSGTEFTLTISSL |
| | | QPEDFATYFCQQFKSYPLTFGQGTKLEIK |
| SEQ ID NO: | VH | QVQLVQSGAEVKKPGSSVKVSCKASGTDFKLTYIHWV |
| 112 | | RQAPGQGLEWMGRIFPGSGNVKYNEKFKGRVTITADTS |
| | | TSTAYMELSSLRSEDTAVYYCAGSYYSYDVLDYWGQG |
| | | TTVTVSS |

A-H.14

| | | |
|---|---|---|
| SEQ ID NO: | VH + VL | QVQLVQSGAEVKKPGSSVKVSCKASGTDFDKIYIHWVR |
| 113 | | QAPGQGLEWMGRISAGSGNTKYNEKFKGRVTITADTST |
| | | STAYMELSSLRSEDTAVYYCAGSYYSYDVLDYWGQGT |
| | | TVTVSSGGGGSGGGGSGGGGSGGGGSDIQMTQSPSFLS |
| | | ASVGDRVTITCKASQNVDDRVAWYQQKPGKAPKALIY |
| | | SSSHRYKGVPSRFSGSGSGTEFTLTISSLQPEDFATYFCQ |
| | | QFKSYPLTFGQGTKLEIK |
| SEQ ID NO: | VL | DIQMTQSPSFLSASVGDRVTITCKASQNVDDRVAWYQQ |
| 114 | | KPGKAPKALIYSSSHRYKGVPSRFSGSGSGTEFTLTISSL |
| | | QPEDFATYFCQQFKSYPLTFGQGTKLEIK |
| SEQ ID NO: | VH | QVQLVQSGAEVKKPGSSVKVSCKASGTDFDKIYIHWVR |
| 115 | | QAPGQGLEWMGRISAGSGNTKYNEKFKGRVTITADTST |
| | | STAYMELSSLRSEDTAVYYCAGSYYSYDVLDYWGQGT |
| | | TVTVSS |

A-H.15

| | | |
|---|---|---|
| SEQ ID NO: | VH + VL | QVQLVQSGAEVKKPGSSVKVSCKASGTDFRLTYIHWV |
| 116 | | RQAPGQGLEWMGRVSPGSGNTKYNEKFKGRVTITADT |
| | | STSTAYMELSSLRSEDTAVYYCAGSYYSYDVLDYWGQ |
| | | GTTVTVSSGGGGSGGGGSGGGGSGGGGSDIQMTQSPSF |
| | | LSASVGDRVTITCKASQNVDNKVAWHQQKPGKAPKAL |
| | | IYSSSHRYKGVPSRFSGSGSGTEFTLTISSLQPEDFATYFC |
| | | QQFKSYPLTFGQGTKLEIK |
| SEQ ID NO: | VL | DIQMTQSPSFLSASVGDRVTITCKASQNVDNKVAWHQ |
| 117 | | QKPGKAPKALIYSSSHRYKGVPSRFSGSGSGTEFTLTISS |
| | | LQPEDFATYFCQQFKSYPLTFGQGTKLEIK |
| SEQ ID NO: | VH | QVQLVQSGAEVKKPGSSVKVSCKASGTDFRLTYIHWV |
| 118 | | RQAPGQGLEWMGRVSPGSGNTKYNEKFKGRVTITADT |
| | | STSTAYMELSSLRSEDTAVYYCAGSYYSYDVLDYWGQ |
| | | GTTVTVSS |

A-H.16

| | | |
|---|---|---|
| SEQ ID NO: | VH + VL | QVQLVQSGAEVKKPGSSVKVSCKASGGTFRLTYIHWV |
| 119 | | RQAPGQGLEWMGRVYPGSGNTKYNEKFKGRVTITADT |
| | | STSTAYMELSSLRSEDTAVYYCAGSYYSYDVLDYWGQ |
| | | GTTVTVSSGGGGSGGGGSGGGGSGGGGSDIQMTQSPSF |
| | | LSASVGDRVTITCKASQNVDDRVAWYQQKPGKAPKAL |
| | | IYSSSHRYKGVPSRFSGSGSGTEFTLTISSLQPEDFATYFC |
| | | QQFKSYPLTFGQGTKLEIK |
| SEQ ID NO: | VL | DIQMTQSPSFLSASVGDRVTITCKASQNVDDRVAWYQQ |
| 120 | | KPGKAPKALIYSSSHRYKGVPSRFSGSGSGTEFTLTISSL |
| | | QPEDFATYFCQQFKSYPLTFGQGTKLEIK |
| SEQ ID NO: | VH | QVQLVQSGAEVKKPGSSVKVSCKASGGTFRLTYIHWV |
| 121 | | RQAPGQGLEWMGRVYPGSGNTKYNEKFKGRVTITADT |
| | | STSTAYMELSSLRSEDTAVYYCAGSYYSYDVLDYWGQ |
| | | GTTVTVSS |

A-H.17

| | | |
|---|---|---|
| SEQ ID NO: | VH + VL | QVQLVQSGAEVKKPGSSVKVSCKASGTDFRLTYIHWV |
| 122 | | RQAPGQGLEWMGRIFPGSGNTKYNEKFKGRVTITADTS |
| | | TSTAYMELSSLRSEDTAVYYCAGSYYSYDVLDYWGQG |
| | | TTVTVSSGGGGSGGGGSGGGGSGGGGSDIQMTQSPSFL |
| | | SASVGDRVTITCKASQNVDDRVAWYQQKPGKAPKALI |
| | | YSSSHRYKGVPSRFSGSGSGTEFTLTISSLQPEDFATYFC |
| | | QQFKSYPLTFGQGTKLEIK |
| SEQ ID NO: | VL | DIQMTQSPSFLSASVGDRVTITCKASQNVDDRVAWYQQ |
| 123 | | KPGKAPKALIYSSSHRYKGVPSRFSGSGSGTEFTLTISSL |
| | | QPEDFATYFCQQFKSYPLTFGQGTKLEIK |
| SEQ ID NO: | VH | QVQLVQSGAEVKKPGSSVKVSCKASGTDFRLTYIHWV |
| 124 | | RQAPGQGLEWMGRIFPGSGNTKYNEKFKGRVTITADTS |
| | | TSTAYMELSSLRSEDTAVYYCAGSYYSYDVLDYWGQG |
| | | TTVTVSS |

A-H.18

| | | |
|---|---|---|
| SEQ ID NO: | VH + VL | QVQLVQSGAEVKKPGSSVKVSCKASGTDFKLTYIHWV |
| 125 | | RQAPGQGLEWMGRIFPGSGNVKYNEKFKGRVTITADTS |
| | | TSTAYMELSSLRSEDTAVYYCAGSYYSYDVLDYWGQG |
| | | TTVTVSSGGGGSGGGGSGGGGSGGGGSDIQMTQSPSFL |
| | | SASVGDRVTITCKASQNVEDRVAWYQQKPGKAPKALI |
| | | YSSSHRYKGVPSRFSGSGSGTEFTLTISSLQPEDFATYFC |
| | | QQFKSYPLTFGQGTKLEIK |
| SEQ ID NO: | VL | DIQMTQSPSFLSASVGDRVTITCKASQNVEDRVAWYQQ |
| 126 | | KPGKAPKALIYSSSHRYKGVPSRFSGSGSGTEFTLTISSL |
| | | QPEDFATYFCQQFKSYPLTFGQGTKLEIK |
| SEQ ID NO: | VH | QVQLVQSGAEVKKPGSSVKVSCKASGTDFKLTYIHWV |
| 127 | | RQAPGQGLEWMGRIFPGSGNVKYNEKFKGRVTITADTS |
| | | TSTAYMELSSLRSEDTAVYYCAGSYYSYDVLDYWGQG |
| | | TTVTVSS |

A-H.19

| | | |
|---|---|---|
| SEQ ID NO: | VH + VL | QVQLVQSGAEVKKPGSSVKVSCKASGGTFRLTYIHWV |
| 128 | | RQAPGQGLEWMGRISAGSGNVKYNEKFKGRVTITADT |
| | | STSTAYMELSSLRSEDTAVYYCAGSYYSYDVLDYWGQ |
| | | GTTVTVSSGGGGSGGGGSGGGGSGGGGSDIQMTQSPSF |
| | | LSASVGDRVTITCKASQNVGDRVAWYQQKPGKAPKAL |
| | | IYSSSHRYKGVPSRFSGSGSGTEFTLTISSLQPEDFATYFC |
| | | QQFKSYPLTFGQGTKLEIK |
| SEQ ID NO: | VL | DIQMTQSPSFLSASVGDRVTITCKASQNVGDRVAWYQQ |
| 129 | | KPGKAPKALIYSSSHRYKGVPSRFSGSGSGTEFTLTISSL |
| | | QPEDFATYFCQQFKSYPLTFGQGTKLEIK |
| SEQ ID NO: | VH | QVQLVQSGAEVKKPGSSVKVSCKASGGTFRLTYIHWV |
| 130 | | RQAPGQGLEWMGRISAGSGNVKYNEKFKGRVTITADT |
| | | STSTAYMELSSLRSEDTAVYYCAGSYYSYDVLDYWGQ |
| | | GTTVTVSS |

A-H.20

| | | |
|---|---|---|
| SEQ ID NO: | VH + VL | QVQLVQSGAEVKKPGSSVKVSCKASGGTFDKTYIHWV |
| 131 | | RQAPGQGLEWMGRISAGSGNTKYNEKFKGRVTITADTS |
| | | TSTAYMELSSLRSEDTAVYYCAGSYYSYDVLDYWGQG |
| | | TTVTVSSGGGGSGGGGSGGGGSGGGGSDIQMTQSPSFL |
| | | SASVGDRVTITCKASQNVDDRVAWYQQKPGKAPKALI |
| | | YSSSHRYKGVPSRFSGSGSGTEFTLTISSLQPEDFATYFC |
| | | QQFKSYPLTFGQGTKLEIK |
| SEQ ID NO: | VL | DIQMTQSPSFLSASVGDRVTITCKASQNVDDRVAWYQQ |
| 132 | | KPGKAPKALIYSSSHRYKGVPSRFSGSGSGTEFTLTISSL |
| | | QPEDFATYFCQQFKSYPLTFGQGTKLEIK |
| SEQ ID NO: | VH | QVQLVQSGAEVKKPGSSVKVSCKASGGTFDKTYIHWV |
| 133 | | RQAPGQGLEWMGRISAGSGNTKYNEKFKGRVTITADTS |
| | | TSTAYMELSSLRSEDTAVYYCAGSYYSYDVLDYWGQG |
| | | TTVTVSS |

A-H.21

| | | |
|---|---|---|
| SEQ ID NO: | VH + VL | QVQLVQSGAEVKKPGSSVKVSCKASGHDFDKFYIHWV |
| 134 | | RQAPGQGLEWMGRISAGSGNTKYNEKFKGRVTITADTS |
| | | TSTAYMELSSLRSEDTAVYYCAGSYYSYDVLDYWGQG |
| | | TTVTVSSGGGGSGGGGSGGGGSGGGGSDIQMTQSPSFL |
| | | SASVGDRVTITCKASQNVDDRVAWYQQKPGKAPKALI |
| | | YSSSHRYKGVPSRFSGSGSGTEFTLTISSLQPEDFATYFC |
| | | QQFKSYPLTFGQGTKLEIK |
| SEQ ID NO: | VL | DIQMTQSPSFLSASVGDRVTITCKASQNVDDRVAWYQQ |
| 135 | | KPGKAPKALIYSSSHRYKGVPSRFSGSGSGTEFTLTISSL |
| | | QPEDFATYFCQQFKSYPLTFGQGTKLEIK |
| SEQ ID NO: | VH | QVQLVQSGAEVKKPGSSVKVSCKASGHDFDKFYIHWV |
| 136 | | RQAPGQGLEWMGRISAGSGNTKYNEKFKGRVTITADTS |
| | | TSTAYMELSSLRSEDTAVYYCAGSYYSYDVLDYWGQG |
| | | TTVTVSS |

A-H.22

| | | |
|---|---|---|
| SEQ ID NO: | VH + VL | QVQLVQSGAEVKKPGSSVKVSCKASGTDFKLTYIHWV |
| 137 | | RQAPGQGLEWMGRISAGSGNVKYNEKFKGRVTITADT |
| | | STSTAYMELSSLRSEDTAVYYCAGSYYSYDVLDYWGQ |
| | | GTTVTVSSGGGGSGGGGSGGGGSGGGGSDIQMTQSPSF |
| | | LSASVGDRVTITCKASQNVDNKVAWHQQKPGKAPKAL |
| | | IYSSSHRYKGVPSRFSGSGSGTEFTLTISSLQPEDFATYFC |
| | | QQFKSYPLTFGQGTKLEIK |
| SEQ ID NO: | VL | DIQMTQSPSFLSASVGDRVTITCKASQNVDNKVAWHQ |
| 138 | | QKPGKAPKALIYSSSHRYKGVPSRFSGSGSGTEFTLTISS |
| | | LQPEDFATYFCQQFKSYPLTFGQGTKLEIK |
| SEQ ID NO: | VH | QVQLVQSGAEVKKPGSSVKVSCKASGTDFKLTYIHWV |
| 139 | | RQAPGQGLEWMGRISAGSGNVKYNEKFKGRVTITADT |
| | | STSTAYMELSSLRSEDTAVYYCAGSYYSYDVLDYWGQ |
| | | GTTVTVSS |

A-H.23

| | | |
|---|---|---|
| SEQ ID NO: | VH + VL | QVQLVQSGAEVKKPGSSVKVSCKASGHDFRLTYIHWV |
| 140 | | RQAPGQGLEWMGRISAGSGNVKYNEKFKGRVTITADT |
| | | STSTAYMELSSLRSEDTAVYYCAGSYYSYDVLDYWGQ |
| | | GTTVTVSSGGGGSGGGGSGGGGSGGGGSDIQMTQSPSF |
| | | LSASVGDRVTITCKASQNVADRVAWYQQKPGKAPKAL |
| | | IYSSSHRYKGVPSRFSGSGSGTEFTLTISSLQPEDFATYFC |
| | | QQFKSYPLTFGQGTKLEIK |
| SEQ ID NO: | VL | DIQMTQSPSFLSASVGDRVTITCKASQNVADRVAWYQQ |
| 141 | | KPGKAPKALIYSSSHRYKGVPSRFSGSGSGTEFTLTISSL |
| | | QPEDFATYFCQQFKSYPLTFGQGTKLEIK |
| SEQ ID NO: | VH | QVQLVQSGAEVKKPGSSVKVSCKASGHDFRLTYIHWV |
| 142 | | RQAPGQGLEWMGRISAGSGNVKYNEKFKGRVTITADT |
| | | STSTAYMELSSLRSEDTAVYYCAGSYYSYDVLDYWGQ |
| | | GTTVTVSS |

A-H.24

| | | |
|---|---|---|
| SEQ ID NO: | VH + VL | QVQLVQSGAEVKKPGSSVKVSCKASGHDFHLWYIHWV |
| 143 | | RQAPGQGLEWMGRVSAGSGNVKYNEKFKGRVTITADT |
| | | STSTAYMELSSLRSEDTAVYYCAGSYYSYDVLDYWGQ |
| | | GTTVTVSSGGGGSGGGGSGGGGSGGGGSDIQMTQSPSF |
| | | LSASVGDRVTITCKASQNVDNKVAWHQQKPGKAPKAL |
| | | IYSSSHRYKGVPSRFSGSGSGTEFTLTISSLQPEDFATYFC |
| | | QQFKSYPLTFGQGTKLEIK |
| SEQ ID NO: | VL | DIQMTQSPSFLSASVGDRVTITCKASQNVDNKVAWHQ |
| 144 | | QKPGKAPKALIYSSSHRYKGVPSRFSGSGSGTEFTLTISS |
| | | LQPEDFATYFCQQFKSYPLTFGQGTKLEIK |
| SEQ ID NO: | VH | QVQLVQSGAEVKKPGSSVKVSCKASGHDFHLWYIHWV |
| 145 | | RQAPGQGLEWMGRVSAGSGNVKYNEKFKGRVTITADT |
| | | STSTAYMELSSLRSEDTAVYYCAGSYYSYDVLDYWGQ |
| | | GTTVTVSS |

A-H.25

| | | |
|---|---|---|
| SEQ ID NO: | VH + VL | QVQLVQSGAEVKKPGSSVKVSCKASGHDFHLWYIHWV |
| 146 | | RQAPGQGLEWMGRVFAGSGNTKYNEKFKGRVTITADT |
| | | STSTAYMELSSLRSEDTAVYYCAGSYYSYDVLDYWGQ |
| | | GTTVTVSSGGGGSGGGGSGGGGSGGGGSDIQMTQSPSF |
| | | LSASVGDRVTITCKASQNVEDKVAWYQQKPGKAPKAL |
| | | IYSSSHRYKGVPSRFSGSGSGTEFTLTISSLQPEDFATYFC |
| | | QQFKSYPLTFGQGTKLEIK |
| SEQ ID NO: | VL | DIQMTQSPSFLSASVGDRVTITCKASQNVEDKVAWYQQ |
| 147 | | KPGKAPKALIYSSSHRYKGVPSRFSGSGSGTEFTLTISSL |
| | | QPEDFATYFCQQFKSYPLTFGQGTKLEIK |
| SEQ ID NO: | VH | QVQLVQSGAEVKKPGSSVKVSCKASGHDFHLWYIHWV |
| 148 | | RQAPGQGLEWMGRVFAGSGNTKYNEKFKGRVTITADT |
| | | STSTAYMELSSLRSEDTAVYYCAGSYYSYDVLDYWGQ |
| | | GTTVTVSS |

A-H.26

| | | |
|---|---|---|
| SEQ ID NO: | VH + VL | QVQLVQSGAEVKKPGSSVKVSCKASGTDFKLTYIHWV |
| 149 | | RQAPGQGLEWMGRIFPGSGNTKYNEKFKGRVTITADTS |
| | | TSTAYMELSSLRSEDTAVYYCAGSYYSYDVLDYWGQG |
| | | TTVTVSSGGGGSGGGGSGGGGSGGGGSDIQMTQSPSFL |
| | | SASVGDRVTITCKASQNVDDRVAWYQQKPGKAPKALI |
| | | YSSSHRYKGVPSRFSGSGSGTEFTLTISSLQPEDFATYFC |
| | | QQFKSYPLTFGQGTKLEIK |
| SEQ ID NO: | VL | DIQMTQSPSFLSASVGDRVTITCKASQNVDDRVAWYQQ |
| 150 | | KPGKAPKALIYSSSHRYKGVPSRFSGSGSGTEFTLTISSL |
| | | QPEDFATYFCQQFKSYPLTFGQGTKLEIK |
| SEQ ID NO: | VH | QVQLVQSGAEVKKPGSSVKVSCKASGTDFKLTYIHWV |
| 151 | | RQAPGQGLEWMGRIFPGSGNTKYNEKFKGRVTITADTS |
| | | TSTAYMELSSLRSEDTAVYYCAGSYYSYDVLDYWGQG |
| | | TTVTVSS |

A-H.27

| | | |
|---|---|---|
| SEQ ID NO: | VH + VL | QVQLVQSGAEVKKPGSSVKVSCKASGTDFKLTYIHWV |
| 153 | | RQAPGQGLEWMGRVSAGSGNVKYNEKFKGRVTITADT |
| | | STSTAYMELSSLRSEDTAVYYCAGSYYSYDVLDYWGQ |
| | | GTTVTVSSGGGGSGGGGSGGGGSGGGGSDIQMTQSPSF |
| | | LSASVGDRVTITCKASQNVGNRVAWYQQKPGKAPKAL |
| | | IYSSSHRYKGVPSRFSGSGSGTEFTLTISSLQPEDFATYFC |
| | | QQFKSYPLTFGQGTKLEIK |
| SEQ ID NO: | VL | DIQMTQSPSFLSASVGDRVTITCKASQNVGNRVAWYQQ |
| 108 | | KPGKAPKALIYSSSHRYKGVPSRFSGSGSGTEFTLTISSL |
| | | QPEDFATYFCQQFKSYPLTFGQGTKLEIK |
| SEQ ID NO: | VH | QVQLVQSGAEVKKPGSSVKVSCKASGTDFKLTYIHWV |
| 155 | | RQAPGQGLEWMGRVSAGSGNVKYNEKFKGRVTITADT |
| | | STSTAYMELSSLRSEDTAVYYCAGSYYSYDVLDYWGQ |
| | | GTTVTVSS |

A-H.28

| | | |
|---|---|---|
| SEQ ID NO: | VH + VL | QVQLVQSGAEVKKPGSSVKVSCKASGTDFKLTYIHWV |
| 156 | | RQAPGQGLEWMGRISPGSGNTKYNEKFKGRVTITADTS |
| | | TSTAYMELSSLRSEDTAVYYCAGSYYSYDVLDYWGQG |
| | | TTVTVSSGGGGSGGGGSGGGGSGGGGSDIQMTQSPSFL |
| | | SASVGDRVTITCKASQNVGDRVAWYQQKPGKAPKALI |
| | | YSSSHRYKGVPSRFSGSGSGTEFTLTISSLQPEDFATYFC |
| | | QQFKSYPLTFGQGTKLEIK |
| SEQ ID NO: | VL | DIQMTQSPSFLSASVGDRVTITCKASQNVGDRVAWYQQ |
| 157 | | KPGKAPKALIYSSSHRYKGVPSRFSGSGSGTEFTLTISSL |
| | | QPEDFATYFCQQFKSYPLTFGQGTKLEIK |
| SEQ ID NO: | VH | QVQLVQSGAEVKKPGSSVKVSCKASGTDFKLTYIHWV |
| 158 | | RQAPGQGLEWMGRISPGSGNTKYNEKFKGRVTITADTS |
| | | TSTAYMELSSLRSEDTAVYYCAGSYYSYDVLDYWGQG |
| | | TTVTVSS |

A-H.29

| | | |
|---|---|---|
| SEQ ID NO: | VH + VL | QVQLVQSGAEVKKPGSSVKVSCKASGHDFHLWYIHWV |
| 159 | | RQAPGQGLEWMGRISPGSGNVKYNEKFKGRVTITADTS |
| | | TSTAYMELSSLRSEDTAVYYCAGSYYSYDVLDYWGQG |
| | | TTVTVSSGGGGSGGGGSGGGGSGGGGSDIQMTQSPSFL |
| | | SASVGDRVTITCKASQNVGDRVAWHQQKPGKAPKALI |
| | | YSSSHRYKGVPSRFSGSGSGTEFTLTISSLQPEDFATYFC |
| | | QQFKSYPLTFGQGTKLEIK |
| SEQ ID NO: | VL | DIQMTQSPSFLSASVGDRVTITCKASQNVGDRVAWHQQ |
| 160 | | KPGKAPKALIYSSSHRYKGVPSRFSGSGSGTEFTLTISSL |
| | | QPEDFATYFCQQFKSYPLTFGQGTKLEIK |
| SEQ ID NO: | VH | QVQLVQSGAEVKKPGSSVKVSCKASGHDFHLWYIHWV |
| 161 | | RQAPGQGLEWMGRISPGSGNVKYNEKFKGRVTITADTS |
| | | TSTAYMELSSLRSEDTAVYYCAGSYYSYDVLDYWGQG |
| | | TTVTVSS |

A-H.31

| | | |
|---|---|---|
| SEQ ID NO: | VH + VL | QVQLVQSGAEVKKPGSSVKVSCKASGHDFKLTYIHWV |
| 162 | | RQAPGQGLEWMGRISAGSGNVKYNEKFKGRVTITADT |
| | | STSTAYMELSSLRSEDTAVYYCAGSYYSYDVLDYWGQ |
| | | GTTVTVSSGGGGSGGGGSGGGGSGGGGSDIQMTQSPSF |
| | | LSASVGDRVTITCKASQNVDDRVAWYQQKPGKAPKAL |
| | | IYSSSHRYKGVPSRFSGSGSGTEFTLTISSLQPEDFATYFC |
| | | QQFKSYPLTFGQGTKLEIK |
| SEQ ID NO: | VL | DIQMTQSPSFLSASVGDRVTITCKASQNVDDRVAWYQQ |
| 163 | | KPGKAPKALIYSSSHRYKGVPSRFSGSGSGTEFTLTISSL |
| | | QPEDFATYFCQQFKSYPLTFGQGTKLEIK |
| SEQ ID NO: | VH | QVQLVQSGAEVKKPGSSVKVSCKASGHDFKLTYIHWV |
| 164 | | RQAPGQGLEWMGRISAGSGNVKYNEKFKGRVTITADT |
| | | STSTAYMELSSLRSEDTAVYYCAGSYYSYDVLDYWGQ |
| | | GTTVTVSS |

A-H.31

| | | |
|---|---|---|
| SEQ ID NO: | VH + VL | QVQLVQSGAEVKKPGSSVKVSCKASGTDFHLWYIHWV |
| 165 | | RQAPGQGLEWMGRVFAGSGSYRYNEKFKGRVTITADT |
| | | STSTAYMELSSLRSEDTAVYYCAGSYYSYDVLDYWGQ |
| | | GTTVTVSSGGGGSGGGGSGGGGSGGGGSDIQMTQSPSF |
| | | LSASVGDRVTITCKASQNVDDRVAWYQQKPGKAPKAL |
| | | IYSSSHRYKGVPSRFSGSGSGTEFTLTISSLQPEDFATYFC |
| | | QQFKSYPLTFGQGTKLEIK |
| SEQ ID NO: | VL | DIQMTQSPSFLSASVGDRVTITCKASQNVDDRVAWYQQ |
| 166 | | KPGKAPKALIYSSSHRYKGVPSRFSGSGSGTEFTLTISSL |
| | | QPEDFATYFCQQFKSYPLTFGQGTKLEIK |
| SEQ ID NO: | VH | QVQLVQSGAEVKKPGSSVKVSCKASGTDFHLWYIHWV |
| 167 | | RQAPGQGLEWMGRVFAGSGSYRYNEKFKGRVTITADT |
| | | STSTAYMELSSLRSEDTAVYYCAGSYYSYDVLDYWGQ |
| | | GTTVTVSS |

A-H.32

| | | |
|---|---|---|
| SEQ ID NO: | VH + VL | QVQLVQSGAEVKKPGSSVKVSCKASGTDFDKIYIHWVR |
| 168 | | QAPGQGLEWMGRISAGSGNTKYNEKFKGRVTITADTST |
| | | STAYMELSSLRSEDTAVYYCAGSYYSYDVLDYWGQGT |
| | | TVTVSSGGGGSGGGGSGGGGSGGGGSDIQMTQSPSFLS |
| | | ASVGDRVTITCKASQNVADRVAWYQQKPGKAPKALIY |
| | | SSSHRYKGVPSRFSGSGSGTEFTLTISSLQPEDFATYFCQ |
| | | QFKSYPLTFGQGTKLEIK |
| SEQ ID NO: | VL | DIQMTQSPSFLSASVGDRVTITCKASQNVADRVAWYQQ |
| 169 | | KPGKAPKALIYSSSHRYKGVPSRFSGSGSGTEFTLTISSL |
| | | QPEDFATYFCQQFKSYPLTFGQGTKLEIK |
| SEQ ID NO: | VH | QVQLVQSGAEVKKPGSSVKVSCKASGTDFDKIYIHWVR |
| 170 | | QAPGQGLEWMGRISAGSGNTKYNEKFKGRVTITADTST |
| | | STAYMELSSLRSEDTAVYYCAGSYYSYDVLDYWGQGT |
| | | TVTVSS |

A-H.33

| | | |
|---|---|---|
| SEQ ID NO: | VH + VL | QVQLVQSGAEVKKPGSSVKVSCKASGTDFKLTYIHWV |
| 171 | | RQAPGQGLEWMGRISAGSGNTKYNEKFKGRVTITADTS |
| | | TSTAYMELSSLRSEDTAVYYCAGSYYSYDVLDYWGQG |
| | | TTVTVSSGGGGSGGGGSGGGGSGGGGSDIQMTQSPSFL |
| | | SASVGDRVTITCKASQNVEDRVAWYQQKPGKAPKALI |
| | | YSSSHRYKGVPSRFSGSGSGTEFTLTISSLQPEDFATYFC |
| | | QQFKSYPLTFGQGTKLEIK |
| SEQ ID NO: | VL | DIQMTQSPSFLSASVGDRVTITCKASQNVEDRVAWYQQ |
| 172 | | KPGKAPKALIYSSSHRYKGVPSRFSGSGSGTEFTLTISSL |
| | | QPEDFATYFCQQFKSYPLTFGQGTKLEIK |
| SEQ ID NO: | VH | QVQLVQSGAEVKKPGSSVKVSCKASGTDFKLTYIHWV |
| 173 | | RQAPGQGLEWMGRISAGSGNTKYNEKFKGRVTITADTS |
| | | TSTAYMELSSLRSEDTAVYYCAGSYYSYDVLDYWGQG |
| | | TTVTVSS |

A-H.34

| | | |
|---|---|---|
| SEQ ID NO: | VH + VL | QVQLVQSGAEVKKPGSSVKVSCKASGTDFRLTYIHWV |
| 174 | | RQAPGQGLEWMGRISPGSGNTKYNEKFKGRVTITADTS |
| | | TSTAYMELSSLRSEDTAVYYCAGSYYSYDVLDYWGQG |
| | | TTVTVSSGGGGSGGGGSGGGGSGGGGSDIQMTQSPSFL |
| | | SASVGDRVTITCKASQNVGNRVAWYQQKPGKAPKALI |
| | | YSSSHRYKGVPSRFSGSGSGTEFTLTISSLQPEDFATYFC |
| | | QQFKSYPLTFGQGTKLEIK |
| SEQ ID NO: | VL | DIQMTQSPSFLSASVGDRVTITCKASQNVGNRVAWYQQ |
| 108 | | KPGKAPKALIYSSSHRYKGVPSRFSGSGSGTEFTLTISSL |
| | | QPEDFATYFCQQFKSYPLTFGQGTKLEIK |
| SEQ ID NO: | VH | QVQLVQSGAEVKKPGSSVKVSCKASGTDFRLTYIHWV |
| 176 | | RQAPGQGLEWMGRISPGSGNTKYNEKFKGRVTITADTS |
| | | TSTAYMELSSLRSEDTAVYYCAGSYYSYDVLDYWGQG |
| | | TTVTVSS |

A-H.35

| | | |
|---|---|---|
| SEQ ID NO: | VH + VL | QVQLVQSGAEVKKPGSSVKVSCKASGHDFDKTYIHWV |
| 177 | | RQAPGQGLEWMGRVSAGSGNVKYNEKFKGRVTITADT |
| | | STSTAYMELSSLRSEDTAVYYCAGSYYSYDVLDYWGQ |
| | | GTTVTVSSGGGGSGGGGSGGGGSGGGGSDIQMTQSPSF |
| | | LSASVGDRVTITCKASQNVEDRVAWYQQKPGKAPKAL |
| | | IYSSSHRYKGVPSRFSGSGSGTEFTLTISSLQPEDFATYFC |
| | | QQFKSYPLTFGQGTKLEIK |
| SEQ ID NO: | VL | DIQMTQSPSFLSASVGDRVTITCKASQNVEDRVAWYQQ |
| 178 | | KPGKAPKALIYSSSHRYKGVPSRFSGSGSGTEFTLTISSL |
| | | QPEDFATYFCQQFKSYPLTFGQGTKLEIK |
| SEQ ID NO: | VH | QVQLVQSGAEVKKPGSSVKVSCKASGHDFDKTYIHWV |
| 179 | | RQAPGQGLEWMGRVSAGSGNVKYNEKFKGRVTITADT |
| | | STSTAYMELSSLRSEDTAVYYCAGSYYSYDVLDYWGQ |
| | | GTTVTVSS |

A-H.36

| | | |
|---|---|---|
| SEQ ID NO: | VH + VL | QVQLVQSGAEVKKPGSSVKVSCKASGHDFKLTYIHWV |
| 180 | | RQAPGQGLEWMGRVSPGSGNTKYNEKFKGRVTITADT |
| | | STSTAYMELSSLRSEDTAVYYCAGSYYSYDVLDYWGQ |
| | | GTTVTVSSGGGGSGGGGSGGGGSGGGGSDIQMTQSPSF |
| | | LSASVGDRVTITCKASQNVEDRVAWHQQKPGKAPKAL |
| | | IYSSSHRYKGVPSRFSGSGSGTEFTLTISSLQPEDFATYFC |
| | | QQFKSYPLTFGQGTKLEIK |
| SEQ ID NO: | VL | DIQMTQSPSFLSASVGDRVTITCKASQNVEDRVAWHQQ |
| 181 | | KPGKAPKALIYSSSHRYKGVPSRFSGSGSGTEFTLTISSL |
| | | QPEDFATYFCQQFKSYPLTFGQGTKLEIK |
| SEQ ID NO: | VH | QVQLVQSGAEVKKPGSSVKVSCKASGHDFKLTYIHWV |
| 182 | | RQAPGQGLEWMGRVSPGSGNTKYNEKFKGRVTITADT |
| | | STSTAYMELSSLRSEDTAVYYCAGSYYSYDVLDYWGQ |
| | | GTTVTVSS |

A-H.37

| | | |
|---|---|---|
| SEQ ID NO: | VH + VL | QVQLVQSGAEVKKPGSSVKVSCKASGHDFDKTYIHWV |
| 183 | | RQAPGQGLEWMGRIYPGSGNVKYNEKFKGRVTITADT |
| | | STSTAYMELSSLRSEDTAVYYCAGSYYSYDVLDYWGQ |
| | | GTTVTVSSGGGGSGGGGSGGGGSGGGGSDIQMTQSPSF |
| | | LSASVGDRVTITCKASQNVADRVAWYQQKPGKAPKAL |
| | | IYSSSHRYKGVPSRFSGSGSGTEFTLTISSLQPEDFATYFC |
| | | QQFKSYPLTFGQGTKLEIK |
| SEQ ID NO: | VL | DIQMTQSPSFLSASVGDRVTITCKASQNVADRVAWYQQ |
| 184 | | KPGKAPKALIYSSSHRYKGVPSRFSGSGSGTEFTLTISSL |
| | | QPEDFATYFCQQFKSYPLTFGQGTKLEIK |
| SEQ ID NO: | VH | QVQLVQSGAEVKKPGSSVKVSCKASGHDFDKTYIHWV |
| 185 | | RQAPGQGLEWMGRIYPGSGNVKYNEKFKGRVTITADT |
| | | STSTAYMELSSLRSEDTAVYYCAGSYYSYDVLDYWGQ |
| | | GTTVTVSS |

A-H.38

| | | |
|---|---|---|
| SEQ ID NO: | VH + VL | QVQLVQSGAEVKKPGSSVKVSCKASGTDFDKTYIHWV |
| 186 | | RQAPGQGLEWMGRISAGSGNVKYNEKFKGRVTITADT |
| | | STSTAYMELSSLRSEDTAVYYCAGSYYSYDVLDYWGQ |
| | | GTTVTVSSGGGGSGGGGSGGGGSGGGGSDIQMTQSPSF |
| | | LSASVGDRVTITCKASQNVDDRVAWYQQKPGKAPKAL |
| | | IYSSSHRYKGVPSRFSGSGSGTEFTLTISSLQPEDFATYFC |
| | | QQFKSYPLTFGQGTKLEIK |
| SEQ ID NO: | VL | DIQMTQSPSFLSASVGDRVTITCKASQNVDDRVAWYQQ |
| 7513 | | KPGKAPKALIYSSSHRYKGVPSRFSGSGSGTEFTLTISSL |
| | | QPEDFATYFCQQFKSYPLTFGQGTKLEIK |
| SEQ ID NO: | VH | QVQLVQSGAEVKKPGSSVKVSCKASGTDFDKTYIHWV |
| 188 | | RQAPGQGLEWMGRISAGSGNVKYNEKFKGRVTITADT |
| | | STSTAYMELSSLRSEDTAVYYCAGSYYSYDVLDYWGQ |
| | | GTTVTVSS |

A-H.39

| | | |
|---|---|---|
| SEQ ID NO: | VH + VL | QVQLVQSGAEVKKPGSSVKVSCKASGTDFDKIYIHWVR |
| 189 | | QAPGQGLEWMGRISAGSGNIKYNEKFKGRVTITADTST |
| | | STAYMELSSLRSEDTAVYYCAGSYYSYDVLDYWGQGT |
| | | TVTVSSGGGGSGGGGSGGGGSGGGGSDIQMTQSPSFLS |
| | | ASVGDRVTITCKASQNVDDRVAWYQQKPGKAPKALIY |
| | | SSSHRYKGVPSRFSGSGSGTEFTLTISSLQPEDFATYFCQ |
| | | QFKSYPLTFGQGTKLEIK |
| SEQ ID NO: | VL | DIQMTQSPSFLSASVGDRVTITCKASQNVDDRVAWYQQ |
| 190 | | KPGKAPKALIYSSSHRYKGVPSRFSGSGSGTEFTLTISSL |
| | | QPEDFATYFCQQFKSYPLTFGQGTKLEIK |
| SEQ ID NO: | VH | QVQLVQSGAEVKKPGSSVKVSCKASGTDFDKIYIHWVR |
| 191 | | QAPGQGLEWMGRISAGSGNIKYNEKFKGRVTITADTST |
| | | STAYMELSSLRSEDTAVYYCAGSYYSYDVLDYWGQGT |
| | | TVTVSS |

A-H.40

| | | |
|---|---|---|
| SEQ ID NO: | VH + VL | QVQLVQSGAEVKKPGSSVKVSCKASGTDFDKIYIHWVR |
| 192 | | QAPGQGLEWMGRISAGSGNVKYNEKFKGRVTITADTS |
| | | TSTAYMELSSLRSEDTAVYYCAGSYYSYDVLDYWGQG |
| | | TTVTVSSGGGGSGGGGSGGGGSGGGGSDIQMTQSPSFL |
| | | SASVGDRVTITCKASQNVGDRVAWYQQKPGKAPKALI |
| | | YSSSHRYKGVPSRFSGSGSGTEFTLTISSLQPEDFATYFC |
| | | QQFKSYPLTFGQGTKLEIK |
| SEQ ID NO: | VL | DIQMTQSPSFLSASVGDRVTITCKASQNVGDRVAWYQQ |
| 193 | | KPGKAPKALIYSSSHRYKGVPSRFSGSGSGTEFTLTISSL |
| | | QPEDFATYFCQQFKSYPLTFGQGTKLEIK |
| SEQ ID NO: | VH | QVQLVQSGAEVKKPGSSVKVSCKASGTDFDKIYIHWVR |
| 194 | | QAPGQGLEWMGRISAGSGNVKYNEKFKGRVTITADTS |
| | | TSTAYMELSSLRSEDTAVYYCAGSYYSYDVLDYWGQG |
| | | TTVTVSS |

A-H.41

| | | |
|---|---|---|
| SEQ ID NO: | VH + VL | QVQLVQSGAEVKKPGSSVKVSCKASGGTFKLTYIHWV |
| 195 | | RQAPGQGLEWMGRVSAGSGNVKYNEKFKGRVTITADT |
| | | STSTAYMELSSLRSEDTAVYYCAGSYYSYDVLDYWGQ |
| | | GTTVTVSSGGGGSGGGGSGGGGSGGGGSDIQMTQSPSF |
| | | LSASVGDRVTITCKASQNVDDRVAWYQQKPGKAPKAL |
| | | IYSSSHRYKGVPSRFSGSGSGTEFTLTISSLQPEDFATYFC |
| | | QQFKSYPLTFGQGTKLEIK |
| SEQ ID NO: | VL | DIQMTQSPSFLSASVGDRVTITCKASQNVDDRVAWYQQ |
| 196 | | KPGKAPKALIYSSSHRYKGVPSRFSGSGSGTEFTLTISSL |
| | | QPEDFATYFCQQFKSYPLTFGQGTKLEIK |
| SEQ ID NO: | VH | QVQLVQSGAEVKKPGSSVKVSCKASGGTFKLTYIHWV |
| 197 | | RQAPGQGLEWMGRVSAGSGNVKYNEKFKGRVTITADT |
| | | STSTAYMELSSLRSEDTAVYYCAGSYYSYDVLDYWGQ |
| | | GTTVTVSS |

A-H.42

| | | |
|---|---|---|
| SEQ ID NO: | VH + VL | QVQLVQSGAEVKKPGSSVKVSCKASGTDFKLTYIHWV |
| 198 | | RQAPGQGLEWMGRISPGSGNVKYNEKFKGRVTITADTS |
| | | TSTAYMELSSLRSEDTAVYYCAGSYYSYDVLDYWGQG |
| | | TTVTVSSGGGGSGGGGSGGGGSGGGGSDIQMTQSPSFL |
| | | SASVGDRVTITCKASQNVDNRVAWHQQKPGKAPKALI |
| | | YSSSHRYKGVPSRFSGSGSGTEFTLTISSLQPEDFATYFC |
| | | QQFKSYPLTFGQGTKLEIK |
| SEQ ID NO: | VL | DIQMTQSPSFLSASVGDRVTITCKASQNVDNRVAWHQQ |
| 199 | | KPGKAPKALIYSSSHRYKGVPSRFSGSGSGTEFTLTISSL |
| | | QPEDFATYFCQQFKSYPLTFGQGTKLEIK |
| SEQ ID NO: | VH | QVQLVQSGAEVKKPGSSVKVSCKASGTDFKLTYIHWV |
| 200 | | RQAPGQGLEWMGRISPGSGNVKYNEKFKGRVTITADTS |
| | | TSTAYMELSSLRSEDTAVYYCAGSYYSYDVLDYWGQG |
| | | TTVTVSS |

A-H.43

| | | |
|---|---|---|
| SEQ ID NO: | VH + VL | QVQLVQSGAEVKKPGSSVKVSCKASGHDFDKFYIHWV |
| 201 | | RQAPGQGLEWMGRVSAGSGNTKYNEKFKGRVTITADT |
| | | STSTAYMELSSLRSEDTAVYYCAGSYYSYDVLDYWGQ |
| | | GTTVTVSSGGGGSGGGGSGGGGSGGGGSDIQMTQSPSF |
| | | LSASVGDRVTITCKASQNVDNRVAWYQQKPGKAPKAL |
| | | IYSSSHRYKGVPSRFSGSGSGTEFTLTISSLQPEDFATYFC |
| | | QQFKSYPLTFGQGTKLEIK |
| SEQ ID NO: | VL | DIQMTQSPSFLSASVGDRVTITCKASQNVDNRVAWYQQ |
| 202 | | KPGKAPKALIYSSSHRYKGVPSRFSGSGSGTEFTLTISSL |
| | | QPEDFATYFCQQFKSYPLTFGQGTKLEIK |
| SEQ ID NO: | VH | QVQLVQSGAEVKKPGSSVKVSCKASGHDFDKFYIHWV |
| 203 | | RQAPGQGLEWMGRVSAGSGNTKYNEKFKGRVTITADT |
| | | STSTAYMELSSLRSEDTAVYYCAGSYYSYDVLDYWGQ |
| | | GTTVTVSS |

A-H.44

| | | |
|---|---|---|
| SEQ ID NO: | VH + VL | QVQLVQSGAEVKKPGSSVKVSCKASGTDFDKFYIHWV |
| 204 | | RQAPGQGLEWMGRVSAGSGNVKYNEKFKGRVTITADT |
| | | STSTAYMELSSLRSEDTAVYYCAGSYYSYDVLDYWGQ |
| | | GTTVTVSSGGGGGGGGSGGGGSGGGGSDIQMTQSPSF |
| | | LSASVGDRVTITCKASQNVGDRVVWYQQKPGKAPKAL |
| | | IYSSSHRYKGVPSRFSGSGSGTEFTLTISSLQPEDFATYFC |
| | | QQFKSYPLTFGQGTKLEIK |
| SEQ ID NO: | VH | QVQLVQSGAEVKKPGSSVKVSCKASGTDFDKFYIHWV |
| 205 | | RQAPGQGLEWMGRVSAGSGNVKYNEKFKGRVTITADT |
| | | STSTAYMELSSLRSEDTAVYYCAGSYYSYDVLDYWGQ |
| | | GTTVTVSS |

A-H.45

| | | |
|---|---|---|
| SEQ ID NO: | VH + VL | QVQLVQSGAEVKKPGSSVKVSCKASGYSFTTYYIHWV |
| 206 | | RQAPGQGLEWMGWFSAGSGNTKYNEKFKGRVTITADT |
| | | STSTAYMELSSLRSEDTAVYYCAVSYYSYDVLDYWGQ |
| | | GTTVTVSSGGGGSGGGGSGGGGSGGGGSDIQMTQSPSF |
| | | LSASVGDRVTITCKASQNVGINVVWHQQKPGKAPKALI |
| | | YSSSHRYSGVPSRFSGSGSGTEFTLTISSLQPEDFATYFC |
| | | QQFKSYPLTFGQGTKLEIK |
| SEQ ID NO: | VH | QVQLVQSGAEVKKPGSSVKVSCKASGYSFTTYYIHWV |
| 207 | | RQAPGQGLEWMGWFSAGSGNTKYNEKFKGRVTITADT |
| | | STSTAYMELSSLRSEDTAVYYCAVSYYSYDVLDYWGQ |
| | | GTTVTVSS |

A-H.46

| | | |
|---|---|---|
| SEQ ID NO: | VH + VL | QVQLVQSGAEVKKPGSSVKVSCKASGYSFTTYYIHWV |
| 208 | | RQAPGQGLEWMGWFSAGSGNTKYNEKFKGRVTITADT |
| | | STSTAYMELSSLRSEDTAVYYCAGSYYSYDVLDYWGQ |
| | | GTTVTVSSGGGGSGGGGSGGGGSGGGGSDIQMTQSPSF |
| | | LSASVGDRVTITCKASQNVGINVVWHQQKPGKAPKALI |
| | | YSSSHRYSGVPSRFSGSGSGTEFTLTISSLQPEDFATYFC |
| | | QQFKSYPLTFGQGTKLEIK |
| SEQ ID NO: | VH | QVQLVQSGAEVKKPGSSVKVSCKASGYSFTTYYIHWV |
| 209 | | RQAPGQGLEWMGWFSAGSGNTKYNEKFKGRVTITADT |
| | | STSTAYMELSSLRSEDTAVYYCAGSYYSYDVLDYWGQ |
| | | GTTVTVSS |

A-H.47

| | | |
|---|---|---|
| SEQ ID NO: | VH + VL | QVQLVQSGAEVKKPGSSVKVSCKASGYSFTTYYIHWV |
| 210 | | RQAPGQGLEWMGWFFPGSGNTKYNEKFKGRVTITADT |
| | | STSTAYMELSSLRSEDTAVYYCAGSYYSYDVLDYWGQ |
| | | GTTVTVSSGGGGSGGGGSGGGGSGGGGSDIQMTQSPSF |
| | | LSASVGDRVTITCKASQNVGINVVWHQQKPGKAPKALI |
| | | YSSSHRYSGVPSRFSGSGSGTEFTLTISSLQPEDFATYFC |
| | | QQFKSYPLTFGQGTKLEIK |
| SEQ ID NO: | VH | QVQLVQSGAEVKKPGSSVKVSCKASGYSFTTYYIHWV |
| 211 | | RQAPGQGLEWMGWFFPGSGNTKYNEKFKGRVTITADT |
| | | STSTAYMELSSLRSEDTAVYYCAGSYYSYDVLDYWGQ |
| | | GTTVTVSS |

A-H.48

| | | |
|---|---|---|
| SEQ ID NO: | VH + VL | QVQLVQSGAEVKKPGSSVKVSCKASGYSFTTYYIHWV |
| 212 | | RQAPGQGLEWMGWFSPGSGNTKYNEKFKGRVTITADT |
| | | STSTAYMELSSLRSEDTAVYYCAVSYYSYDVLDYWGQ |
| | | GTTVTVSSGGGGSGGGGSGGGGSGGGGSDIQMTQSPSF |
| | | LSASVGDRVTITCKASQNVGINVVWHQQKPGKAPKALI |
| | | YSSSHRYSGVPSRFSGSGSGTEFTLTISSLQPEDFATYFC |
| | | QQFKSYPLTFGQGTKLEIK |
| SEQ ID NO: | VH | QVQLVQSGAEVKKPGSSVKVSCKASGYSFTTYYIHWV |
| 213 | | RQAPGQGLEWMGWFSPGSGNTKYNEKFKGRVTITADT |
| | | STSTAYMELSSLRSEDTAVYYCAVSYYSYDVLDYWGQ |
| | | GTTVTVSS |

A-H.49

| | | |
|---|---|---|
| SEQ ID NO: | VH + VL | QVQLVQSGAEVKKPGSSVKVSCKASGYSFTTYYIHWV |
| 214 | | RQAPGQGLEWMGWFSPGSGNTKYNEKFKGRVTITADT |
| | | STSTAYMELSSLRSEDTAVYYCAGSYYSYDVLDYWGQ |
| | | GTTVTVSSGGGGSGGGGSGGGGSGGGGSDIQMTQSPSF |
| | | LSASVGDRVTITCKASQNVGINVVWHQQKPGKAPKALI |
| | | YSSSHRYSGVPSRFSGSGSGTEFTLTISSLQPEDFATYFC |
| | | QQFKSYPLTFGQGTKLEIK |
| SEQ ID NO: | VH | QVQLVQSGAEVKKPGSSVKVSCKASGYSFTTYYIHWV |
| 215 | | RQAPGQGLEWMGWFSPGSGNTKYNEKFKGRVTITADT |
| | | STSTAYMELSSLRSEDTAVYYCAGSYYSYDVLDYWGQ |
| | | GTTVTVSS |

A-H.50

| | | |
|---|---|---|
| SEQ ID NO: | VH + VL | QVQLVQSGAEVKKPGSSVKVSCKASGYSFTTYYIHWV |
| 216 | | RQAPGQGLEWMGRIFPGSGNIKYNEKFKGRVTITADTS |
| | | TSTAYMELSSLRSEDTAVYYCAGSYYSYDVLDYWGQG |
| | | TTVTVSSGGGGSGGGGSGGGGSGGGGSDIQMTQSPSFL |
| | | SASVGDRVTITCKASQNVGINVVWHQQKPGKAPKALIY |
| | | SSSHRYSGVPSRFSGSGSGTEFTLTISSLQPEDFATYFCQ |
| | | QFKSYPLTFGQGTKLEIK |
| SEQ ID NO: | VH | QVQLVQSGAEVKKPGSSVKVSCKASGYSFTTYYIHWV |
| 217 | | RQAPGQGLEWMGRIFPGSGNIKYNEKFKGRVTITADTS |
| | | TSTAYMELSSLRSEDTAVYYCAGSYYSYDVLDYWGQG |
| | | TTVTVSS |

A-H.51

| | | |
|---|---|---|
| SEQ ID NO: | VH + VL | QVQLVQSGAEVKKPGSSVKVSCKASGYSFTTYYIHWV |
| 218 | | RQAPGQGLEWMGWFFPGSGNIKYNEKFKGRVTITADT |
| | | STSTAYMELSSLRSEDTAVYYCAGSIYSAGVLDYWGQG |
| | | TTVTVSSGGGGSGGGGSGGGGSGGGGSDIQMTQSPSFL |
| | | SASVGDRVTITCKASQNVGINVVWHQQKPGKAPKALIY |
| | | SSSHRYSGVPSRFSGSGSGTEFTLTISSLQPEDFATYFCQ |
| | | QFKSYPLTFGQGTKLEIK |
| SEQ ID NO: | VH | QVQLVQSGAEVKKPGSSVKVSCKASGYSFTTYYIHWV |
| 219 | | RQAPGQGLEWMGWFFPGSGNIKYNEKFKGRVTITADT |
| | | STSTAYMELSSLRSEDTAVYYCAGSIYSAGVLDYWGQG |
| | | TTVTVSS |

A-H.52

| | | |
|---|---|---|
| SEQ ID NO: | VH + VL | QVQLVQSGAEVKKPGSSVKVSCKASGYSFTLGYIHWV |
| 220 | | RQAPGQGLEWMGWFFPGSGNIKYNEKFKGRVTITADT |
| | | STSTAYMELSSLRSEDTAVYYCAGSYYSYDVLDYWGQ |
| | | GTTVTVSSGGGGSGGGGSGGGGSGGGGSDIQMTQSPSF |
| | | LSASVGDRVTITCKASQNVGINVVWHQQKPGKAPKALI |
| | | YSSSHRYSGVPSRFSGSGSGTEFTLTISSLQPEDFATYFC |
| | | QQFKSYPLTFGQGTKLEIK |
| SEQ ID NO: | VH | QVQLVQSGAEVKKPGSSVKVSCKASGYSFTLGYIHWV |
| 221 | | RQAPGQGLEWMGWFFPGSGNIKYNEKFKGRVTITADT |
| | | STSTAYMELSSLRSEDTAVYYCAGSYYSYDVLDYWGQ |
| | | GTTVTVSS |

A-H.53

| | | |
|---|---|---|
| SEQ ID NO: | VH + VL | QVQLVQSGAEVKKPGSSVKVSCKASGYSFRLTYIHWV |
| 222 | | RQAPGQGLEWMGWFFPGSGNIKYNEKFKGRVTITADT |
| | | STSTAYMELSSLRSEDTAVYYCAGSYYSYDVLDYWGQ |
| | | GTTVTVSSGGGGSGGGGSGGGGSGGGGSDIQMTQSPSF |
| | | LSASVGDRVTITCKASQNVGINVVWHQQKPGKAPKALI |
| | | YSSSHRYSGVPSRFSGSGSGTEFTLTISSLQPEDFATYFC |
| | | QQFKSYPLTFGQGTKLEIK |
| SEQ ID NO: | VH | QVQLVQSGAEVKKPGSSVKVSCKASGYSFRLTYIHWV |
| 223 | | RQAPGQGLEWMGWFFPGSGNIKYNEKFKGRVTITADT |
| | | STSTAYMELSSLRSEDTAVYYCAGSYYSYDVLDYWGQ |
| | | GTTVTVSS |

A-H.54

| | | |
|---|---|---|
| SEQ ID NO: | VH + VL | QVQLVQSGAEVKKPGSSVKVSCKASGYSFHNWYIHWV |
| 224 | | RQAPGQGLEWMGWFFPGSGNIKYNEKFKGRVTITADT |
| | | STSTAYMELSSLRSEDTAVYYCAGSYYSYDVLDYWGQ |
| | | GTTVTVSSGGGGSGGGGSGGGGSGGGGSDIQMTQSPSF |
| | | LSASVGDRVTITCKASQNVGINVVWHQQKPGKAPKALI |
| | | YSSSHRYSGVPSRFSGSGSGTEFTLTISSLQPEDFATYFC |
| | | QQFKSYPLTFGQGTKLEIK |
| SEQ ID NO: | VH | QVQLVQSGAEVKKPGSSVKVSCKASGYSFHNWYIHWV |
| 225 | | RQAPGQGLEWMGWFFPGSGNIKYNEKFKGRVTITADT |
| | | STSTAYMELSSLRSEDTAVYYCAGSYYSYDVLDYWGQ |
| | | GTTVTVSS |

A-H.55 antibody

| | | |
|---|---|---|
| SEQ ID NO: 3 | HC CDR1 | GYSFTTYYIH |
| | (Combined) | |
| SEQ ID NO: 4 | HC CDR2 | WFFPGSGNIKYNEKFKG |
| | (Combined) | |
| SEQ ID NO: 5 | HC CDR3 | SYYSYDVLDY |
| | (Combined) | |
| SEQ ID NO: | HC CDR1 (Kabat) | TYYIH |
| 45 | | |
| SEQ ID NO: | HC CDR2 (Kabat) | WFFPGSGNIKYNEKFKG |
| 46 | | |
| SEQ ID NO: | HC CDR3 (Kabat) | SYYSYDVLDY |
| 47 | | |
| SEQ ID | HC CDR1 (Chothia) | GYSFTTY |
| NO: 48 | | |
| SEQ ID NO: | HC CDR2 (Chothia) | FPGSGN |
| 49 | | |
| SEQ ID NO: | HC CDR3 (Chothia) | SYYSYDVLDY |
| 50 | | |
| SEQ ID NO: | VH | QVQLVQSGAEVKKPGSSVKVSCKASGYSFTTYYIHWV |
| 1100 | | RQAPGQGLEWMGWFFPGSGNIKYNEKFKGRVTITADT |
| | | STSTAYMELSSLRSEDTAVYYCAGSYYSYDVLDYWGQ |
| | | GTTVTVSS |
| SEQ ID NO: 6 | LC CDR1 | KASQNVGINVV |
| | (Combined) | |
| SEQ ID NO: 7 | LC CDR2 | SSSHRYS |
| | (Combined) | |
| SEQ ID NO: 8 | LC CDR3 | QQFKSYPLT |
| | (Combined) | |
| SEQ ID NO: | LC CDR1 (Kabat) | KASQNVGINVV |
| 51 | | |
| SEQ ID NO: | LC CDR2 (Kabat) | SSSHRYS |
| 52 | | |
| SEQ ID NO: | LC CDR3 (Kabat) | QQFKSYPLT |
| 53 | | |
| SEQ ID NO: | LC CDR1 (Chothia) | KASQNVGINVV |
| 54 | | |
| SEQ ID NO: | LC CDR2 (chothia) | SSSHRYS |
| 55 | | |
| SEQ ID NO: | LC CDR3 (chothia) | QQFKSYPLT |
| 56 | | |
| SEQ ID NO: | VL | QSVLTQPPSVSEAPRQRVTISCKASQNVGINVVWHQQL |
| 1101 | | PGKAPKALIYSSSHRYSGVSDRFSGSGSGTSFSLAISGLQ |
| | | SEDEADYFCQQFKSYPLTFGTGTKVTVL |

A-H.56

| | | |
|---|---|---|
| SEQ ID NO: | VH+ VL (ScFv) | QVQLVQSGAEVKKPGSSVKVSCKASGHDFDKFYIHWV |
| 1309 | | RQAPGQGLEWMGRVSAGSGNVKYNEKFKGRVTITADT |
| | | STSTAYMELSSLRSEDTAVYYCAGSYYSYDVLDYWGQ |
| | | GTTVTVSSGGGGSGGGGSGGGGSGGGGSDIQMTQSPSF |
| | | LSASVGDRVTITCKASQNVGNRVAWYQQKPGKAPKAL |
| | | IYSSSHRYKGVPSRFSGSGSGTEFTLTISSLQPEDFATYFC |
| | | QQFKSYPLTFGQGTKLEIK |

A-H.57

| | | |
|---|---|---|
| SEQ ID NO: | VH+ VL (ScFv) | QVQLVQSGAEVKKPGSSVKVSCKASGHDFRLTYIHWV |
| 1326 | | RQAPGQGLEWMGRVSAGSGNTKYNEKFKGRVTITADT |
| | | STSTAYMELSSLRSEDTAVYYCAVSYYSYDVLDYWGQ |
| | | GTTVTVSSGGGGSGGGGSGGGGSGGGGSDIQMTQSPSF |
| | | LSASVGDRVTITCKASQNVGDRVVWHQQKPGKAPKAL |
| | | IYSSSHRYKGVPSRFSGSGSGTEFTLTISSLQPEDFATYFC |
| | | QQFKSYPLTFGQGTKLEIK |

A-H.58

| | | |
|---|---|---|
| SEQ ID NO: | VH+ VL (ScFv) | QVQLVQSGAEVKKPGSSVKVSCKASGHDFRLTYIHWV |
| 1327 | | RQAPGQGLEWMGRVSAGSGNVKYNEKFKGRVTITADT |
| | | STSTAYMELSSLRSEDTAVYYCAVSYYSYDVLDYWGQ |
| | | GTTVTVSSGGGGSGGGGSGGGGSGGGGSDIQMTQSPSF |
| | | LSASVGDRVTITCKASQNVGNRVVWHQQKPGKAPKAL |
| | | IYSSSHRYKGVPSRFSGSGSGTEFTLTISSLQPEDFATYFC |
| | | QQFKSYPLTFGQGTKLEIK |

A-H.59

| | | |
|---|---|---|
| SEQ ID NO: | VH+ VL (ScFv) | QVQLVQSGAEVKKPGSSVKVSCKASGHDFRLTYIHWV |
| 1328 | | RQAPGQGLEWMGRIYAGSGNVKYNEKFKGRVTITADT |
| | | STSTAYMELSSLRSEDTAVYYCAVSYYSYDVLDYWGQ |
| | | GTTVTVSSGGGGSGGGGSGGGGSGGGGSDIQMTQSPSF |
| | | LSASVGDRVTITCKASQNVADRVVWHQQKPGKAPKAL |
| | | IYSSSHRYKGVPSRFSGSGSGTEFTLTISSLQPEDFATYFC |
| | | QQFKSYPLTFGQGTKLEIK |

A-H.60

| | | |
|---|---|---|
| SEQ ID NO: | VH+ VL (ScFv) | QVQLVQSGAEVKKPGSSVKVSCKASGHDFKLTYIHWV |
| 1329 | | RQAPGQGLEWMGRVSAGSGNTKYNEKFKGRVTITADT |
| | | STSTAYMELSSLRSEDTAVYYCAVSYYSYDVLDYWGQ |
| | | GTTVTVSSGGGGSGGGGSGGGGSGGGGSDIQMTQSPSF |
| | | LSASVGDRVTITCKASQNVGDRVAWHQQKPGKAPKAL |
| | | IYSSSHRYKGVPSRFSGSGSGTEFTLTISSLQPEDFATYFC |
| | | QQFKSYPLTFGQGTKLEIK |

A-H.61

| | | |
|---|---|---|
| SEQ ID NO: | VH+ VL (ScFv) | QVQLVQSGAEVKKPGSSVKVSCKASGHDFKLTYIHWV |
| 1330 | | RQAPGQGLEWMGRVSAGSGNTKYNEKFKGRVTITADT |
| | | STSTAYMELSSLRSEDTAVYYCAVSYYSYDVLDYWGQ |
| | | GTTVTVSSGGGGSGGGGSGGGGSGGGGSDIQMTQSPSF |
| | | LSASVGDRVTITCKASQNVDNRVAWHQQKPGKAPKAL |
| | | IYSSSHRYKGVPSRFSGSGSGTEFTLTISSLQPEDFATYFC |
| | | QQFKSYPLTFGQGTKLEIK |

A-H.62

| | | |
|---|---|---|
| SEQ ID NO: | VH+ VL (ScFv) | QVQLVQSGAEVKKPGSSVKVSCKASGHDFRLTYIHWV |
| 1331 | | RQAPGQGLEWMGRVSAGSGNVKYNEKFKGRVTITADT |
| | | STSTAYMELSSLRSEDTAVYYCAVSYYSYDVLDYWGQ |
| | | GTTVTVSSGGGGSGGGGSGGGGSGGGGSDIQMTQSPSF |
| | | LSASVGDRVTITCKASQNVADRVVWHQQKPGKAPKAL |
| | | IYSSSHRYKGVPSRFSGSGSGTEFTLTISSLQPEDFATYFC |
| | | QQFKSYPLTFGQGTKLEIK |

A-H.63

| | | |
|---|---|---|
| SEQ ID NO: | VH+ VL (ScFv) | QVQLVQSGAEVKKPGSSVKVSCKASGHDFRLTYIHWV |
| 1332 | | RQAPGQGLEWMGRVYAGSGNTKYNEKFKGRVTITADT |
| | | STSTAYMELSSLRSEDTAVYYCAVSYYSYDVLDYWGQ |
| | | GTTVTVSSGGGGSGGGGSGGGGSGGGGSDIQMTQSPSF |
| | | LSASVGDRVTITCKASQNVEDRVVWHQQKPGKAPKAL |
| | | IYSSSHRYKGVPSRFSGSGSGTEFTLTISSLQPEDFATYFC |
| | | QQFKSYPLTFGQGTKLEIK |

A-H.64

| | | |
|---|---|---|
| SEQ ID NO: | VH+ VL (ScFv) | QVQLVQSGAEVKKPGSSVKVSCKASGHDFKLTYIHWV |
| 1333 | | RQAPGQGLEWMGRVSAGSGNTKYNEKFKGRVTITADT |
| | | STSTAYMELSSLRSEDTAVYYCAVSYYSYDVLDYWGQ |
| | | GTTVTVSSGGGGSGGGGSGGGGSGGGGSDIQMTQSPSF |
| | | LSASVGDRVTITCKASQNVADRVVWHQQKPGKAPKAL |
| | | IYSSSHRYKGVPSRFSGSGSGTEFTLTISSLQPEDFATYFC |
| | | QQFKSYPLTFGQGTKLEIK |

A-H.65

| | | |
|---|---|---|
| SEQ ID NO: | VH+ VL (ScFv) | QVQLVQSGAEVKKPGSSVKVSCKASGHDFKLTYIHWV |
| 1334 | | RQAPGQGLEWMGRISAGSGNTKYNEKFKGRVTITADTS |
| | | TSTAYMELSSLRSEDTAVYYCAVSYYSYDVLDYWGQG |
| | | TTVTVSSGGGGSGGGGSGGGGSGGGGSDIQMTQSPSFL |
| | | SASVGDRVTITCKASQNVGDRVVWHQQKPGKAPKALI |
| | | YSSSHRYKGVPSRFSGSGSGTEFTLTISSLQPEDFATYFC |
| | | QQFKSYPLTFGQGTKLEIK |

A-H.66

| | | |
|---|---|---|
| SEQ ID NO: | VH+ VL (ScFv) | QVQLVQSGAEVKKPGSSVKVSCKASGHDFKLTYIHWV |
| 1335 | | RQAPGQGLEWMGRIYAGSGNTKYNEKFKGRVTITADT |
| | | STSTAYMELSSLRSEDTAVYYCAVSYYSYDVLDYWGQ |
| | | GTTVTVSSGGGGSGGGGSGGGGSGGGGSDIQMTQSPSF |
| | | LSASVGDRVTITCKASQNVGDRVVWHQQKPGKAPKAL |
| | | IYSSSHRYKGVPSRFSGSGSGTEFTLTISSLQPEDFATYFC |
| | | QQFKSYPLTFGQGTKLEIK |

A-H.67

| | | |
|---|---|---|
| SEQ ID NO: | VH+ VL (ScFv) | QVQLVQSGAEVKKPGSSVKVSCKASGTDFKLTYIHWV |
| 1336 | | RQAPGQGLEWMGRIFPGSGNVKYNEKFKGRVTITADTS |
| | | TSTAYMELSSLRSEDTAVYYCAVSYYSYDVLDYWGQG |
| | | TTVTVSSGGGGSGGGGSGGGGSGGGGSDIQMTQSPSFL |
| | | SASVGDRVTITCKASQNVDNRVAWYQQKPGKAPKALI |
| | | YSSSHRYKGVPSRFSGSGSGTEFTLTISSLQPEDFATYFC |
| | | QQFKSYPLTFGQGTKLEIK |

A-H.68

| | | |
|---|---|---|
| SEQ ID NO: | VH+ VL (ScFv) | QVQLVQSGAEVKKPGSSVKVSCKASGHDFRLTYIHWV |
| 1337 | | RQAPGQGLEWMGRISAGSGNVKYNEKFKGRVTITADT |
| | | STSTAYMELSSLRSEDTAVYYCAVSYYSYDVLDYWGQ |
| | | GTTVTVSSGGGGSGGGGSGGGGSGGGGSDIQMTQSPSF |
| | | LSASVGDRVTITCKASQNVADRVAWYQQKPGKAPKAL |
| | | IYSSSHRYKGVPSRFSGSGSGTEFTLTISSLQPEDFATYFC |
| | | QQFKSYPLTFGQGTKLEIK |

A-H.69 (also referred to as A-H.13)

| | | |
|---|---|---|
| SEQ ID NO: | VH+ VL (ScFv) | QVQLVQSGAEVKKPGSSVKVSCKASGTDFKLTYIHWV |
| 110 | | RQAPGQGLEWMGRIFPGSGNVKYNEKFKGRVTITADTS |
| | | TSTAYMELSSLRSEDTAVYYCAGSYYSYDVLDYWGQG |
| | | TTVTVSSGGGGSGGGGSGGGGSGGGGSDIQMTQSPSFL |
| | | SASVGDRVTITCKASQNVDNRVAWYQQKPGKAPKALI |
| | | YSSSHRYKGVPSRFSGSGSGTEFTLTISSLQPEDFATYFC |
| | | QQFKSYPLTFGQGTKLEIK |

A-H humanized-matured VH

| | | |
|---|---|---|
| SEQ ID NO: | VH-humanized | QVQLVQSGAEVKKPGSSVKVSCKASGTDFKLTYIHWV |
| 1310 | matured 1 | RQAPGQGLEWMGRIFPGSGNVKYNEKFKGRVTITADTS |
| | | TSTAYMELSSLRSEDTAVYYCAGSYYSYDVLDYWGQG |
| | | TTVTVSS |
| SEQ ID NO: | VH-humanized | QVQLVQSGAEVKKPGSSVKVSCKASGTDFKLTYIHWV |
| 1311 | matured 2 | RQAPGQGLEWMGRIFPGSGNVKYNEKFKGRVTITADTS |
| | | TSTAYMELSSLRSEDTAVYYCAVSYYSYDVLDYWGQG |
| | | TTVTVSS |
| SEQ ID NO: | VH-humanized | QVQLVQSGAEVKKPGSSVKVSCKASGHDFRLTYIHWV |
| 1312 | matured 3 | RQAPGQGLEWMGRISAGSGNVKYNEKFKGRVTITADT |
| | | STSTAYMELSSLRSEDTAVYYCAVSYYSYDVLDYWGQ |
| | | GTTVTVSS |

A-H humanized-matured VL

| | | |
|---|---|---|
| SEQ ID NO: | VL-humanized | DIQMTQSPSFLSASVGDRVTITCKASQNVDNRVAWYQQ |
| 1313 | matured 1 | KPGKAPKALIYSSSHRYKGVPSRFSGSGSGTEFTLTISSL |
| | | QPEDFATYFCQQFKSYPLTFGQGTKLEIK |
| SEQ ID NO: | VL-humanized | DIQMTQSPSFLSASVGDRVTITCKASQNVADRVAWYQQ |
| 1314 | matured 2 | KPGKAPKALIYSSSHRYKGVPSRFSGSGSGTEFTLTISSL |
| | | QPEDFATYFCQQFKSYPLTFGQGTKLEIK |

A-H.70

| | | |
|---|---|---|
| SEQ ID NO: | HC CDR1 | GHDFRLTYIH |
| 3650 | | |
| SEQ ID NO: | HC CDR2 | RVSAGSGNVKYNEKFKG |
| 3651 | | |
| SEQ ID NO: 5 | HC CDR3 | SYYSYDVLDY |
| SEQ ID NO: | LC CDR1 | KASQNVGNRVV |
| 3652 | | |
| SEQ ID NO: | LC CDR2 | SSSHRYK |
| 3653 | | |
| SEQ ID NO: 8 | LC CDR3 | QQFKSYPLT |
| SEQ ID NO: | VH | QVQLVQSGAEVKKPGSSVKVSCKASGHDFRLTYIHWV |
| 1346 | (CDRs underlined) | RQAPGQGLEWMGRVSAGSGNVKYNEKFKGRVTITADT |
| | | STSTAYMELSSLRSEDTAVYYCAVSYYSYDVLDYWGQ |
| | | GTTVTVSS |
| SEQ ID NO: | VL | DIQMTQSPSFLSASVGDRVTITCKASQNVGNRVVWHQQ |
| 1347 | (CDRs underlined) | KPGKAPKALIYSSSHRYKGVPSRFSGSGSGTEFTLTISSL |
| | | QPEDFATYFCQQFKSYPLTFGQGTKLEIK |

A-H.71

| | | |
|---|---|---|
| SEQ ID NO: | HC CDR1 | GHDFRLTYIH |
| 3650 | | |
| SEQ ID NO: | HC CDR2 | RIYAGSGNVKYNEKFKG |
| 3654 | | |
| SEQ ID NO: 5 | HC CDR3 | SYYSYDVLDY |
| SEQ ID NO: | LC CDR1 | KASQNVADRVV |
| 3655 | | |
| SEQ ID NO: | LC CDR2 | SSSHRYK |
| 3653 | | |
| SEQ ID NO: 8 | LC CDR3 | QQFKSYPLT |
| SEQ ID NO: | VH | QVQLVQSGAEVKKPGSSVKVSCKASGHDFRLTYIHWV |
| 1348 | (CDRs underlined) | RQAPGQGLEWMGRIYAGSGNVKYNEKFKGRVTITADT |
| | | STSTAYMELSSLRSEDTAVYYCAVSYYSYDVLDYWGQ |
| | | GTTVTVSS |
| SEQ ID NO: | VL | DIQMTQSPSFLSASVGDRVTITCKASQNVADRVVWHQQ |
| 1349 | (CDRs underlined) | KPGKAPKALIYSSSHRYKGVPSRFSGSGSGTEFTLTISSL |
| | | QPEDFATYFCQQFKSYPLTFGQGTKLEIK |

A-H.72

| | | |
|---|---|---|
| SEQ ID NO: | HC CDR1 | GHDFKLTYIH |
| 3656 | | |
| SEQ ID NO: | HC CDR2 | RVSAGSGNTKYNEKFKG |
| 3657 | | |
| SEQ ID NO: 5 | HC CDR3 | SYYSYDVLDY |
| SEQ ID NO: | LC CDR1 | KASQNVGDRVA |
| 3658 | | |
| SEQ ID NO: | LC CDR2 | SSSHRYK |
| 3653 | | |
| SEQ ID NO: 8 | LC CDR3 | QQFKSYPLT |
| SEQ ID NO: | VH | QVQLVQSGAEVKKPGSSVKVSCKASGHDFKLTYIHWV |
| 1350 | (CDRs underlined) | RQAPGQGLEWMGRVSAGSGNTKYNEKFKGRVTITADT |
| | | STSTAYMELSSLRSEDTAVYYCAVSYYSYDVLDYWGQ |
| | | GTTVTVSS |
| SEQ ID NO: | VL | DIQMTQSPSFLSASVGDRVTITCKASQNVGDRVAWHQQ |
| 1351 | (CDRs underlined) | KPGKAPKALIYSSSHRYKGVPSRFSGSGSGTEFTLTISSL |
| | | QPEDFATYFCQQFKSYPLTFGQGTKLEIK |

A-H.73

| | | |
|---|---|---|
| SEQ ID NO: | HC CDR1 | GHDFKLTYIH |
| 3656 | | |
| SEQ ID NO: | HC CDR2 | RVSAGSGNTKYNEKFKG |
| 3657 | | |
| SEQ ID NO: 5 | HC CDR3 | SYYSYDVLDY |
| SEQ ID NO: | LC CDR1 | KASQNVDNRVA |
| 3667 | | |
| SEQ ID NO: | LC CDR2 | SSSHRYK |
| 3653 | | |
| SEQ ID NO: 8 | LC CDR3 | QQFKSYPLT |
| SEQ ID NO: | VH | QVQLVQSGAEVKKPGSSVKVSCKASGHDFKLTYIHWV |
| 1350 | (CDRs underlined) | RQAPGQGLEWMGRVSAGSGNTKYNEKFKGRVTITADT |
| | | STSTAYMELSSLRSEDTAVYYCAVSYYSYDVLDYWGQ |
| | | GTTVTVSS |
| SEQ ID NO: | VL | DIQMTQSPSFLSASVGDRVTITCKASQNVDNRVAWHQQ |
| 1353 | (CDRs underlined) | KPGKAPKALIYSSSHRYKGVPSRFSGSGSGTEFTLTISSL |
| | | QPEDFATYFCQQFKSYPLTFGQGTKLEIK |

A-H.74

| | | |
|---|---|---|
| SEQ ID NO: | HC CDR1 | GHDFRLTYIH |
| 3650 | | |
| SEQ ID NO: | HC CDR2 | RVSAGSGNVKYNEKFKG |
| 3651 | | |
| SEQ ID NO: 5 | HC CDR3 | SYYSYDVLDY |
| SEQ ID NO: | LC CDR1 | KASQNVADRVV |
| 3655 | | |
| SEQ ID NO: | LC CDR2 | SSSHRYK |
| 3653 | | |
| SEQ ID NO: 8 | LC CDR3 | QQFKSYPLT |
| SEQ ID NO: | VH | QVQLVQSGAEVKKPGSSVKVSCKASGHDFRLTYIHWV |
| 1346 | (CDRs underlined) | RQAPGQGLEWMGRVSAGSGNVKYNEKFKGRVTITADT |
| | | STSTAYMELSSLRSEDTAVYYCAVSYYSYDVLDYWGQ |
| | | GTTVTVSS |
| SEQ ID NO: | VL | DIQMTQSPSFLSASVGDRVTITCKASQNVADRVVWHQQ |
| 1349 | (CDRs underlined) | KPGKAPKALIYSSSHRYKGVPSRFSGSGSGTEFTLTISSL |
| | | QPEDFATYFCQQFKSYPLTFGQGTKLEIK |

A-H.75

| | | |
|---|---|---|
| SEQ ID NO: | HC CDR1 | GHDFRLTYIH |
| 3650 | | |
| SEQ ID NO: | HC CDR2 | RVYAGSGNTKYNEKFKG |
| 3659 | | |
| SEQ ID NO: 5 | HC CDR3 | SYYSYDVLDY |
| SEQ ID NO: | LC CDR1 | KASQNVEDRVV |
| 3660 | | |
| SEQ ID NO: | LC CDR2 | SSSHRYK |
| 3653 | | |
| SEQ ID NO: 8 | LC CDR3 | QQFKSYPLT |
| SEQ ID NO: | VH | QVQLVQSGAEVKKPGSSVKVSCKASGHDFRLTYIHWV |
| 1356 | (CDRs underlined) | RQAPGQGLEWMGRVYAGSGNTKYNEKFKGRVTITADT |
| | | STSTAYMELSSLRSEDTAVYYCAVSYYSYDVLDYWGQ |
| | | GTTVTVSS |
| SEQ ID NO: | VL | DIQMTQSPSFLSASVGDRVTITCKASQNVEDRVVWHQQ |
| 1357 | (CDRs underlined) | KPGKAPKALIYSSSHRYKGVPSRFSGSGSGTEFTLTISSL |
| | | QPEDFATYFCQQFKSYPLTFGQGTKLEIK |

A-H.76

| | | |
|---|---|---|
| SEQ ID NO: | HC CDR1 | GHDFKLTYIH |
| 3656 | | |
| SEQ ID NO: | HC CDR2 | RVSAGSGNTKYNEKFKG |
| 3657 | | |
| SEQ ID NO: 5 | HC CDR3 | SYYSYDVLDY |
| SEQ ID NO: | LC CDR1 | KASQNVADRVV |
| 3655 | | |
| SEQ ID NO: | LC CDR2 | SSSHRYK |
| 3653 | | |
| SEQ ID NO: 8 | LC CDR3 | QQFKSYPLT |
| SEQ ID NO: | VH | QVQLVQSGAEVKKPGSSVKVSCKASGHDFKLTYIHWV |
| 1350 | (CDRs underlined) | RQAPGQGLEWMGRVSAGSGNTKYNEKFKGRVTITADT |
| | | STSTAYMELSSLRSEDTAVYYCAVSYYSYDVLDYWGQ |
| | | GTTVTVSS |
| SEQ ID NO: | VL | DIQMTQSPSFLSASVGDRVTITCKASQNVADRVVWHQQ |
| 1349 | (CDRs underlined) | KPGKAPKALIYSSSHRYKGVPSRFSGSGSGTEFTLTISSL |
| | | QPEDFATYFCQQFKSYPLTFGQGTKLEIK |

A-H.77

| | | |
|---|---|---|
| SEQ ID NO: | HC CDR1 | GHDFKLTYIH |
| 3656 | | |
| SEQ ID NO: | HC CDR2 | RISAGSGNTKYNEKFKG |
| 3661 | | |
| SEQ ID NO: 5 | HC CDR3 | SYYSYDVLDY |
| SEQ ID NO: | LC CDR1 | KASQNVGDRVV |
| 3662 | | |
| SEQ ID NO: | LC CDR2 | SSSHRYK |
| 3653 | | |
| SEQ ID NO: 8 | LC CDR3 | QQFKSYPLT |
| SEQ ID NO: | VH | QVQLVQSGAEVKKPGSSVKVSCKASGHDFKLTYIHWV |
| 1360 | (CDRs underlined) | RQAPGQGLEWMGRISAGSGNTKYNEKFKGRVTITADTS |
| | | TSTAYMELSSLRSEDTAVYYCAVSYYSYDVLDYWGQG |
| | | TTVTVSS |
| SEQ ID NO: | VL | DIQMTQSPSFLSASVGDRVTITCKASQNVGDRVVWHQQ |
| 1361 | (CDRs underlined) | KPGKAPKALIYSSSHRYKGVPSRFSGSGSGTEFTLTISSL |
| | | QPEDFATYFCQQFKSYPLTFGQGTKLEIK |

A-H.78

| | | |
|---|---|---|
| SEQ ID NO: | HC CDR1 | GHDFKLTYIH |
| 3656 | | |
| SEQ ID NO: | HC CDR2 | RIYAGSGNTKYNEKFKG |
| 3663 | | |
| SEQ ID NO: 5 | HC CDR3 | SYYSYDVLDY |
| SEQ ID NO: | LC CDR1 | KASQNVGDRVV |
| 3662 | | |
| SEQ ID NO: | LC CDR2 | SSSHRYK |
| 3653 | | |
| SEQ ID NO: 8 | LC CDR3 | QQFKSYPLT |
| SEQ ID NO: | VH | QVQLVQSGAEVKKPGSSVKVSCKASGHDFKLTYIHWV |
| 1362 | (CDRs underlined) | RQAPGQGLEWMGRIYAGSGNTKYNEKFKGRVTITADT |
| | | STSTAYMELSSLRSEDTAVYYCAVSYYSYDVLDYWGQ |
| | | GTTVTVSS |
| SEQ ID NO: | VL | DIQMTQSPSFLSASVGDRVTITCKASQNVGDRVVWHQQ |
| 1361 | (CDRs underlined) | KPGKAPKALIYSSSHRYKGVPSRFSGSGSGTEFTLTISSL |
| | | QPEDFATYFCQQFKSYPLTFGQGTKLEIK |

A-H.79

| | | |
|---|---|---|
| SEQ ID NO: | HC CDR1 | GHDFKLTYIH |
| 3656 | | |
| SEQ ID NO: | HC CDR2 | RVSAGSGNTKYNEKFKG |
| 3657 | | |
| SEQ ID NO: 5 | HC CDR3 | SYYSYDVLDY |
| SEQ ID NO: | LC CDR1 | RASQNVDNRLG |
| 3666 | | |
| SEQ ID NO: | LC CDR2 | SSSHRYK |
| 3653 | | |
| SEQ ID NO: 8 | LC CDR3 | QQFKSYPLT |
| SEQ ID NO: | VH | QVQLVQSGAEVKKPGSSVKVSCKASGHDFKLTYIHWV |
| 1350 | (CDRs underlined) | RQAPGQGLEWMGRVSAGSGNTKYNEKFKGRVTITADT |
| | | STSTAYMELSSLRSEDTAVYYCAVSYYSYDVLDYWGQ |
| | | GTTVTVSS |
| SEQ ID NO: | VL | DIQMTQSPSFLSASVGDRVTITCRASQNVDNRLGWHQQ |
| 1365 | (CDRs underlined) | KPGKAPKALIYSSSHRYKGVPSRFSGSGSGTEFTLTISSL |
| | | QPEDFATYFCQQFKSYPLTFGQGTKLEIK |

A-H.80

| | | |
|---|---|---|
| SEQ ID NO: | HC CDR1 | GHDFKLTYIH |
| 3656 | | |
| SEQ ID NO: | HC CDR2 | RVSAGSGNTKYNEKFKG |
| 3657 | | |
| SEQ ID NO: 5 | HC CDR3 | SYYSYDVLDY |
| SEQ ID NO: | LC CDR1 | KASQNVDNRVA |
| 3667 | | |
| SEQ ID NO: | LC CDR2 | AASSLQK |
| 3668 | | |
| SEQ ID NO: 8 | LC CDR3 | QQFKSYPLT |
| SEQ ID NO: | VH | QVQLVQSGAEVKKPGSSVKVSCKASGHDFKLTYIHWV |
| 1350 | (CDRs underlined) | RQAPGQGLEWMGRVSAGSGNTKYNEKFKGRVTITADT |
| | | STSTAYMELSSLRSEDTAVYYCAVSYYSYDVLDYWGQ |
| | | GTTVTVSS |
| SEQ ID NO: | VL | DIQMTQSPSFLSASVGDRVTITCKASQNVDNRVAWHQQ |
| 1367 | (CDRs underlined) | KPGKAPKALIYAASSLQKGVPSRFSGSGSGTEFTLTISSL |
| | | QPEDFATYFCQQFKSYPLTFGQGTKLEIK |

A-H.81

| | | |
|---|---|---|
| SEQ ID NO: | HC CDR1 | GHDFKLTYIH |
| 3656 | | |
| SEQ ID NO: | HC CDR2 | RVSAGSGNTKYNEKFKG |
| 3657 | | |
| SEQ ID NO: 5 | HC CDR3 | SYYSYDVLDY |
| SEQ ID NO: | LC CDR1 | KASQNVDNRVA |
| 3667 | | |
| SEQ ID NO: | LC CDR2 | SSSHRYK |
| 3653 | | |
| SEQ ID NO: | LC CDR3 | LQHNSYPLT |
| 3664 | | |
| SEQ ID NO: | VH | QVQLVQSGAEVKKPGSSVKVSCKASGHDFKLTYIHWV |
| 1350 | (CDRs underlined) | RQAPGQGLEWMGRVSAGSGNTKYNEKFKGRVTITADT |
| | | STSTAYMELSSLRSEDTAVYYCAVSYYSYDVLDYWGQ |
| | | GTTVTVSS |
| SEQ ID NO: | VL | DIQMTQSPSFLSASVGDRVTITCKASQNVDNRVAWHQQ |
| 1369 | (CDRs underlined) | KPGKAPKALIYSSSHRYKGVPSRFSGSGSGTEFTLTISSL |
| | | QPEDFATYFCLQHNSYPLTFGQGTKLEIK |

A-H.82

| | | |
|---|---|---|
| SEQ ID NO: | HC CDR1 | GHDFKLTYIH |
| 3656 | | |
| SEQ ID NO: | HC CDR2 | RVSAGSGNVNYAQKFQG |
| 3665 | | |
| SEQ ID NO: 5 | HC CDR3 | SYYSYDVLDY |
| SEQ ID NO: | LC CDR1 | RASQNVDNRLG |
| 3666 | | |
| SEQ ID NO: | LC CDR2 | SSSHRYK |
| 3653 | | |
| SEQ ID NO: 8 | LC CDR3 | QQFKSYPLT |
| SEQ ID NO: | VH | QVQLVQSGAEVKKPGSSVKVSCKASGHDFKLTYIHWV |
| 1370 | (CDRs underlined) | RQAPGQGLEWMGRVSAGSGNVNYAQKFQGRVTITAD |
| | | TSTSTAYMELSSLRSEDTAVYYCAVSYYSYDVLDYWG |
| | | QGTTVTVSS |
| SEQ ID NO: | VL | DIQMTQSPSFLSASVGDRVTITCRASQNVDNRLGWHQQ |
| 1365 | (CDRs underlined) | KPGKAPKALIYSSSHRYKGVPSRFSGSGSGTEFTLTISSL |
| | | QPEDFATYFCQQFKSYPLTFGQGTKLEIK |

A-H.83

| | | |
|---|---|---|
| SEQ ID NO: | HC CDR1 | GHDFKLTYIH |
| 3656 | | |
| SEQ ID NO: | HC CDR2 | RVSAGSGNVNYAQKFQG |
| 3665 | | |
| SEQ ID NO: 5 | HC CDR3 | SYYSYDVLDY |
| SEQ ID NO: | LC CDR1 | KASQNVDNRVA |
| 3667 | | |
| SEQ ID NO: | LC CDR2 | AASSLQK |
| 3668 | | |
| SEQ ID NO: 8 | LC CDR3 | QQFKSYPLT |
| SEQ ID NO: | VH | QVQLVQSGAEVKKPGSSVKVSCKASGHDFKLTYIHWV |
| 1370 | (CDRs underlined) | RQAPGQGLEWMGRVSAGSGNVNYAQKFQGRVTITAD |
| | | TSTSTAYMELSSLRSEDTAVYYCAVSYYSYDVLDYWG |
| | | QGTTVTVSS |
| SEQ ID NO: | VL | DIQMTQSPSFLSASVGDRVTITCKASQNVDNRVAWHQQ |
| 1367 | (CDRs underlined) | KPGKAPKALIYAASSLQKGVPSRFSGSGSGTEFTLTISSL |
| | | QPEDFATYFCQQFKSYPLTFGQGTKLEIK |

A-H.84

| | | |
|---|---|---|
| SEQ ID NO: | HC CDR1 | GHDFKLTYIH |
| 3656 | | |
| SEQ ID NO: | HC CDR2 | RVSAGSGNVNYAQKFQG |
| 3665 | | |
| SEQ ID NO: 5 | HC CDR3 | SYYSYDVLDY |
| SEQ ID NO: | LC CDR1 | KASQNVDNRVA |
| 3667 | | |
| SEQ ID NO: | LC CDR2 | SSSHRYK |
| 3653 | | |
| SEQ ID NO: | LC CDR3 | LQHNSYPLT |
| 3664 | | |
| SEQ ID NO: | VH | QVQLVQSGAEVKKPGSSVKVSCKASGHDFKLTYIHWV |
| 1370 | (CDRs underlined) | RQAPGQGLEWMGRVSAGSGNVNYAQKFQGRVTITAD |
| | | TSTSTAYMELSSLRSEDTAVYYCAVSYYSYDVLDYWG |
| | | QGTTVTVSS |
| SEQ ID NO: | VL | DIQMTQSPSFLSASVGDRVTITCKASQNVDNRVAWHQQ |
| 1369 | (CDRs underlined) | KPGKAPKALIYSSSHRYKGVPSRFSGSGSGTEFTLTISSL |
| | | QPEDFATYFCLQHNSYPLTFGQGTKLEIK |

A-H.85

| | | |
|---|---|---|
| SEQ ID NO: | HC CDR1 | GHDFRLTYIH |
| 3650 | | |
| SEQ ID NO: | HC CDR2 | RVSAGSGNTKYNEKFKG |
| 3657 | | |
| SEQ ID NO: 5 | HC CDR3 | SYYSYDVLDY |
| SEQ ID NO: | LC CDR1 | KASQNVGDRVV |
| 3662 | | |
| SEQ ID NO: | LC CDR2 | SSSHRYK |
| 3653 | | |
| SEQ ID NO: 8 | LC CDR3 | QQFKSYPLT |
| SEQ ID NO: | VH (CDRs | QVQLVQSGAEVKKPGSSVKVSCKASGHDFRLTYIHWV |
| 1344 | underlined) | RQAPGQGLEWMGRVSAGSGNTKYNEKFKGRVTITADT |
| | | STSTAYMELSSLRSEDTAVYYCAVSYYSYDVLDYWGQ |
| | | GTTVTVSS |
| SEQ ID NO: | VL | DIQMTQSPSFLSASVGDRVTITCKASQNVGDRVVWHQQ |
| 1361 | (CDRs underlined) | KPGKAPKALIYSSSHRYKGVPSRFSGSGSGTEFTLTISSL |
| | | QPEDFATYFCQQFKSYPLTFGQGTKLEIK |

TABLE 2
Amino acid and nucleotide sequences for murine and humanized antibody molecules
which bind to TCRVB 12, e.g., TCRVB 12-3 or TCRVB 12-4. The antibody molecules include
murine mAb Antibody B and humanized mAb Antibody B-H. 1 to B-H.6. The amino acid the
heavy and light chain CDRs, and the amino acid and nucleotide sequences of the heavy
and light chain variable regions, and the heavy and light chains are shown.
Antibody B (murine), also referred to as 16G8

| | | |
|---|---|---|
| SEQ ID NO: 17 | HC CDR1 (Combined) | GFTFSNFGMH |
| SEQ ID NO: 18 | HC CDR2 (Combined) | YISSGSSTIYYADTLKG |
| SEQ ID NO: 19 | HC CDR3 (Combined) | RGEGAMDY |
| SEQ ID NO: 57 | HC CDR1 (Kabat) | NFGMH |
| SEQ ID NO: 58 | HC CDR2 (Kabat) | YISSGSSTIYYADTLKG |
| SEQ ID NO: 59 | HC CDR3 (Kabat) | RGEGAMDY |
| SEQ ID NO: 60 | HC CDR1 (Chothia) | GFTFSNF |
| SEQ ID NO: 61 | HC CDR2 (Chothia) | SSGSST |
| SEQ ID NO: 62 | HC CDR3 (Chothia) | RGEGAMDY |
| SEQ ID NO: 15 | VH | DVQLVESGGGLVQPGGSRKLSCAASGFTFSNFG |
| | | MHWVRQAPDKGLEWVAYISSGSSTIYYADTLKG |
| | | RFTISRDNPKNTLFLQMTSLRSEDTAMYYCARRG |
| | | EGAMDYWGQGTSVTVSS |
| SEQ ID NO: 20 | LC CDR1 (Combined) | RASSSVNYIY |
| SEQ ID NO: 21 | LC CDR2 (Combined) | YTSNLAP |
| SEQ ID NO: 22 | LC CDR3 (Combined) | QQFTSSPFT |
| SEQ ID NO: 63 | LC CDR1 (Kabat) | RASSSVNYIY |
| SEQ ID NO: 64 | LC CDR2 (Kabat) | YTSNLAP |
| SEQ ID NO: 65 | LC CDR3 (Kabat) | QQFTSSPFT |
| SEQ ID NO: 66 | LC CDR1 (Chothia) | RASSSVNYIY |
| SEQ ID NO: 67 | LC CDR2 (Chothia) | YTSNLAP |
| SEQ ID NO: 68 | LC CDR3 (Chothia) | QQFTSSPFT |
| SEQ ID NO: 16 | VL | ENVLTQSPAIMSASLGEKVTMSCRASSSVNYIYW |
| | | YQQKSDASPKLWIYYTSNLAPGVPTRFSGSGSGN |
| | | SYSLTISSMEGEDAATYYCQQFTSSPFTFGSGTKL |
| | | EIK |

Antibody B humanized (B-H)
Antibody B-H.1A HC-1

| | | |
|---|---|---|
| SEQ ID NO: 17 | HC CDR1 (Combined) | GFTFSNFGMH |
| SEQ ID NO: 18 | HC CDR2 (Combined) | YISSGSSTIYYADTLKG |
| SEQ ID NO: 19 | HC CDR3 (Combined) | RGEGAMDY |
| SEQ ID NO: 3438 | VH | EVQLVESGGGLVQPGGSLRLSCAASGFTFSNFGM |
| | | HWVRQAPGKGLEWVSYISSGSSTIYYADTLKGRF |
| | | TISRDNAKNSLYLQMNSLRAEDTAVYYCARRGE |
| | | GAMDYWGQGTTVTVSS |
| SEQ ID NO: 31 | DNA VH | GAGGTGCAGCTGGTTGAATCTGGCGGAGGATT |
| | | GGTTCAGCCTGGCGGCTCTCTGAGACTGTCTTG |
| | | TGCCGCTTCTGGCTTCACCTTCTCCAACTTCGG |
| | | CATGCACTGGGTCCGACAGGCCCCTGGAAAAG |
| | | GACTGGAATGGGTGTCCTACATCTCCTCCGGCT |
| | | CCTCCACCATCTACTACGCTGACACCCTGAAGG |
| | | GCAGATTCACCATCTCTCGGGACAACGCCAAG |
| | | AACTCCCTGTACCTGCAGATGAACAGCCTGAG |
| | | AGCCGAGGACACCGCCGTGTACTACTGTGCTA |
| | | GAAGAGGCGAGGGCGCCATGGATTATTGGGGC |
| | | CAGGGAACCACAGTGACCGTGTCTAGC |

Antibody B-H.1B HC-2

| | | |
|---|---|---|
| SEQ ID NO: 17 | HC CDR1 (Combined) | GFTFSNFGMH |
| SEQ ID NO: 18 | HC CDR2 (Combined) | YISSGSSTIYYADTLKG |
| SEQ ID NO: 19 | HC CDR3 (Combined) | RGEGAMDY |
| SEQ ID NO: 25 | VH | EVQLVESGGGLVQPGGSLRLSCAASGFTFSNFGM |
| | | HWVRQAPGKGLEWVSYISSGSSTIYYADTLKGRF |
| | | TISRDNSKNTLYLQMNSLRAEDTAVYYCARRGE |
| | | GAMDYWGQGTTVTVSS |
| SEQ ID NO: 32 | DNA VH | GAGGTGCAGCTGGTTGAATCTGGCGGAGGATT |
| | | GGTTCAGCCTGGCGGCTCTCTGAGACTGTCTTG |
| | | TGCCGCTTCTGGCTTCACCTTCTCCAACTTCGG |
| | | CATGCACTGGGTCCGACAGGCCCCTGGAAAAG |
| | | GACTGGAATGGGTGTCCTACATCTCCTCCGGCT |
| | | CCTCCACCATCTACTACGCTGACACCCTGAAGG |
| | | GCAGATTCACCATCAGCCGGGACAACTCCAAG |
| | | AACACCCTGTACCTGCAGATGAACTCCCTGAG |
| | | AGCCGAGGACACCGCCGTGTACTACTGTGCTA |
| | | GAAGAGGCGAGGGCGCCATGGATTATTGGGGC |
| | | CAGGGAACCACAGTGACCGTGTCTAGC |

Antibody B-H.1C HC-3

| | | |
|---|---|---|
| SEQ ID NO: 17 | HC CDR1 (Combined) | GFTFSNFGMH |
| SEQ ID NO: 18 | HC CDR2 (Combined) | YISSGSSTIYYADTLKG |
| SEQ ID NO: 19 | HC CDR3 (Combined) | RGEGAMDY |
| SEQ ID NO: 23 | VH | QVQLVESGGGVVQPGRSLRLSCAASGFTFSNFG |
| | | MHWVRQAPGKGLEWVAYISSGSSTIYYADTLKG |
| | | RFTISRDNSKNTLYLQMNSLRAEDTAVYYCARR |
| | | GEGAMDYWGQGTTVTVSS |
| SEQ ID NO: 33 | DNA VH | CAGGTGCAGCTGGTGGAATCTGGTGGCGGAGT |
| | | TGTGCAGCCTGGCAGATCCCTGAGACTGTCTTG |
| | | TGCCGCCTCTGGCTTCACCTTCTCCAACTTCGG |
| | | CATGCACTGGGTCCGACAGGCCCCTGGAAAAG |
| | | GATTGGAGTGGGTCGCCTACATCTCCTCCGGCT |
| | | CCTCCACCATCTACTACGCTGACACCCTGAAGG |
| | | GCAGATTCACCATCAGCCGGGACAACTCCAAG |
| | | AACACCCTGTACCTGCAGATGAACTCCCTGAG |
| | | AGCCGAGGACACCGCCGTGTACTACTGTGCTA |
| | | GAAGAGGCGAGGGCGCCATGGATTATTGGGGC |
| | | CAGGGAACCACAGTGACCGTGTCTAGC |

Antibody B-H.1D LC-1

| | | |
|---|---|---|
| SEQ ID NO: 20 | LC CDR1 (Combined) | RASSSVNYIY |
| SEQ ID NO: 21 | LC CDR2 (Combined) | YTSNLAP |
| SEQ ID NO: 22 | LC CDR3 (Combined) | QQFTSSPFT |
| SEQ ID NO: 26 | VL | DNQLTQSPSFLSASVGDRVTITCRASSSVNYIYW |
| | | YQQKPGKAPKLLIYYTSNLAPGVPSRFSGSGSGN |
| | | EYTLTISSLQPEDFATYYCQQFTSSPFTFGQGTKL |
| | | EIK |
| SEQ ID NO: 34 | DNA VL | GATAACCAGCTGACCCAGTCTCCTAGCTTCCTG |
| | | TCTGCCTCTGTGGGCGACAGAGTGACAATTAC |
| | | CTGCCGGGCCTCCTCCTCCGTGAACTACATCTA |
| | | CTGGTATCAGCAGAAGCCCGGCAAGGCCCCTA |
| | | AGCTGCTGATCTACTACACCTCCAATCTGGCCC |
| | | CTGGCGTGCCCTCTAGATTTTCCGGATCTGGCT |
| | | CCGGCAACGAGTATACCCTGACAATCTCCAGC |
| | | CTGCAGCCTGAGGACTTCGCCACCTACTACTGC |
| | | CAGCAGTTCACCTCCTCTCCATTCACCTTTGGC |
| | | CAGGGCACCAAGCTGGAAATCAAA |

Antibody B-H.1E LC-2

| | | |
|---|---|---|
| SEQ ID NO: 20 | LC CDR1 (Combined) | RASSSVNYIY |
| SEQ ID NO: 21 | LC CDR2 (Combined) | YTSNLAP |
| SEQ ID NO: 22 | LC CDR3 (Combined) | QQFTSSPFT |
| SEQ ID NO: 27 | VL | DNQLTQSPSSLSASVGDRVTITCRASSSVNYIYW |
| | | YQQKPGKAPKLLIYYTSNLAPGVPSRFSGSGSGN |
| | | DYTLTISSLQPEDFATYYCQQFTSSPFTFGQGTKL |
| | | EIK |
| SEQ ID NO: 35 | DNA VL | ATAACCAGCTGACCCAGTCTCCTTCCAGCCTGT |
| | | CTGCTTCTGTGGGCGACAGAGTGACAATTACCT |
| | | GCCGGGCCTCCTCCTCCGTGAACTACATCTACT |
| | | GGTATCAGCAGAAGCCCGGCAAGGCCCCTAAG |
| | | CTGCTGATCTACTACACCTCCAATCTGGCCCCT |
| | | GGCGTGCCCTCTAGATTTTCCGGATCTGGCTCC |
| | | GGCAACGACTATACCCTGACAATCTCCAGCCT |
| | | GCAGCCTGAGGACTTCGCCACCTACTACTGCC |
| | | AGCAGTTCACCTCCTCTCCATTCACCTTTGGCC |
| | | AGGGCACCAAGCTGGAAATCAAA |

Antibody B-H.1F LC-3

| | | |
|---|---|---|
| SEQ ID NO: 20 | LC CDR1 (Combined) | RASSSVNYIY |
| SEQ ID NO: 21 | LC CDR2 (Combined) | YTSNLAP |
| SEQ ID NO: 22 | LC CDR3 (Combined) | QQFTSSPFT |
| SEQ ID NO: 28 | VL | ENVLTQSPATLSVSPGERATLSCRASSSVNYIYW |
| | | YQQKPGQAPRLLIYYTSNLAPGIPARFSGSGSGNE |
| | | YTLTISSLQSEDFAVYYCQQFTSSPFTFGQGTKLEI |
| | | K |
| SEQ ID NO: 36 | DNA VL | GAGAATGTGCTGACCCAGTCTCCTGCCACACT |
| | | GTCTGTTAGCCCTGGCGAGAGAGCTACCCTGA |
| | | GCTGCAGAGCCTCTTCCTCCGTGAACTACATCT |
| | | ACTGGTATCAGCAGAAGCCCGGCCAGGCTCCT |
| | | AGACTGCTGATCTACTACACCTCCAATCTGGCC |
| | | CCTGGCATCCCTGCCAGATTTTCCGGATCTGGC |
| | | TCCGGCAACGAGTATACCCTGACCATCTCCAG |
| | | CCTGCAGTCCGAGGACTTTGCTGTGTACTATTG |
| | | CCAGCAGTTCACAAGCAGCCCTTTCACCTTTGG |
| | | CCAGGGCACCAAGCTGGAAATCAAA |

Antibody B-H.1G LC-4

| | | |
|---|---|---|
| SEQ ID NO: 20 | LC CDR1 (Combined) | RASSSVNYIY |
| SEQ ID NO: 21 | LC CDR2 (Combined) | YTSNLAP |
| SEQ ID NO: 22 | LC CDR3 (Combined) | QQFTSSPFT |
| SEQ ID NO: 29 | VL | QNVLTQPPSASGTPGQRVTISCRASSSVNYIYWY |
| | | QQLPGTAPKLLIYYTSNLAPGVPDRFSGSGSGNS |
| | | YSLAISGLRSEDEADYYCQQFTSSPFTFGTGTKVT |
| | | VL |
| SEQ ID NO: 37 | DNA VL | CAGAATGTGCTGACCCAACCTCCTTCCGCCTCT |
| | | GGCACACCTGGACAGAGAGTGACAATCTCCTG |
| | | CCGGGCCTCCTCCTCCGTGAACTACATCTACTG |
| | | GTATCAGCAGCTGCCCGGCACCGCTCCTAAAC |
| | | TGCTGATCTACTACACCTCCAATCTGGCCCCTG |
| | | GCGTGCCCGATAGATTTTCCGGATCTGGCTCCG |
| | | GCAACTCCTACAGCCTGGCTATCTCTGGCCTGA |
| | | GATCTGAGGACGAGGCCGACTACTACTGCCAG |
| | | CAGTTCACCTCCTCTCCATTCACCTTTGGCACC |
| | | GGCACCAAAGTGACAGTTCTT |

Antibody B-H.1H LC-5

| | | |
|---|---|---|
| SEQ ID NO: 20 | LC CDR1 (Combined) | RASSSVNYIY |
| SEQ ID NO: 21 | LC CDR2 (Combined) | YTSNLAP |
| SEQ ID NO: 22 | LC CDR3 (Combined) | QQFTSSPFT |
| SEQ ID NO: 30 | VL | SNELTQPPSVSVSPGQTARITCRASSSVNYIYWYQ |
| | | QKSGQAPVLVIYYTSNLAPGIPERFSGSGSGNMY |
| | | TLTISGAQVEDEADYYCQQFTSSPFTFGTGTKVT |
| | | VL |
| SEQ ID NO: 38 | DNA VL | TCTAATGAGCTGACCCAGCCTCCTTCCGTGTCC |
| | | GTGTCTCCTGGACAGACCGCCAGAATTACCTG |
| | | CCGGGCCTCCTCCTCCGTGAACTACATCTACTG |
| | | GTATCAGCAGAAGTCCGGCCAGGCTCCTGTGC |
| | | TCGTGATCTACTACACCTCCAATCTGGCCCCTG |
| | | GCATCCCTGAGAGATTCTCCGGATCTGGCTCCG |
| | | GCAACATGTACACCCTGACCATCTCTGGCGCCC |
| | | AGGTGGAAGATGAGGCCGACTACTACTGCCAG |
| | | CAGTTCACCTCCTCTCCATTCACCTTTGGCACC |
| | | GGCACCAAAGTGACAGTTCTT |

Antibody B-H.1

| | | |
|---|---|---|
| SEQ ID NO: 3280 | Chain 1: Fc only | METDTLLLWVLLLWVPGSTGDKTHTCPPCPAPE |
| | | LLGGPSVFLFPPKPKDTLMISRTPEVTCVVVDVSH |
| | | EDPEVKFNWYVDGVEVHNAKTKPREEQYNSTY |
| | | RVVSVLTVLHQDWLNGKEYKCKVSNKALPAPIE |
| | | KTISKAKGQPREPQVYTLPPCREEMTKNQVSLW |
| | | CLVKGFYPSDIAVEWESNGQPENNYKTTPPVLDS |
| | | DGSFFLYSKLTVDKSRWQQGNVFSCSVMHEALH |
| | | NRFTQKSLSLSPGK |
| SEQ ID NO: 3281 | Chain 2: humanized B- | METDTLLLWVLLLWVPGSTGEVQLVESGGGLVQ |
| | H scFv | PGGSLRLSCAASGFTFSNFGMHWVRQAPGKGLE |
| | | WVSYISSGSSTIYYADTLKGRFTISRDNSKNTLYL |
| | | QMNSLRAEDTAVYYCARRGEGAMDYWGQGTT |
| | | VTVSSGGGGSGGGGSGGGGSGGGGSDNQLTQSP |
| | | SFLSASVGDRVTITCRASSSVNYIYWYQQKPGKA |
| | | PKLLIYYTSNLAPGVPSRFSGSGSGNEYTLTISSLQ |
| | | PEDFATYYCQQFTSSPFTFGQGTKLEIKGGGGSD |
| | | KTHTCPPCPAPELLGGPSVFLFPPKPKDTLMISRT |
| | | PEVTCVVVDVSHEDPEVKFNWYVDGVEVHNAK |
| | | TKPREEQYNSTYRVVSVLTVLHQDWLNGKEYKC |
| | | KVSNKALPAPIEKTISKAKGQPREPQVCTLPPSRE |
| | | EMTKNQVSLSCAVKGFYPSDIAVEWESNGQPEN |
| | | NYKTTPPVLDSDGSFFLVSKLTVDKSRWQQGNV |
| | | FSCSVMHEALHNHYTQKSLSLSPGKGGGGSGGG |
| | | GSGLNDIFEAQKIEWHE |
| SEQ ID NO: 3642 | scFv | EVQLVESGGGLVQPGGSLRLSCAASGFTFSNFGM |
| | | HWVRQAPGKGLEWVSYISSGSSTIYYADTLKGRF |
| | | TISRDNSKNTLYLQMNSLRAEDTAVYYCARRGE |
| | | GAMDYWGQGTTVTVSSGGGGSGGGGSGGGGSG |
| | | GGGSDNQLTQSPSFLSASVGDRVTITCRASSSVN |
| | | YIYWYQQKPGKAPKLLIYYTSNLAPGVPSRFSGS |
| | | GSGNEYTLTISSLQPEDFATYYCQQFTSSPFTFGQ |
| | | GTKLEIK |

Antibody B-H.2

| | | |
|---|---|---|
| SEQ ID NO: 1338 | scFv | EVQLVESGGGLVQPGGSLRLSCAASGFTFSNFGM |
| | | HWVRQAPGKGLEWVSYISSGSSTIYYADTLKGRF |
| | | TISRDNSKNTLYLQMNSLRAEDTAVYYCARRGE |
| | | GAMDYWGQGTTVTVSSGGGGSGGGGSGGGGSG |
| | | GGGSDNQLTQSPSSLSASVGDRVTITCRASSSVN |
| | | YIYWYQQKPGKAPKLLIYYTSNLAPGVPSRFSGS |
| | | GSGNDYTLTISSLQPEDFATYYCQQFTSSPFTFGQ |
| | | GTKLEIK |

Antibody B-H.3

| | | |
|---|---|---|
| SEQ ID NO: 1339 | scFv | EVQLVESGGGLVQPGGSLRLSCAASGFTFSNFGM |
| | | HWVRQAPGKGLEWVSYISSGSSTIYYADTLKGRF |
| | | TISRDNSKNTLYLQMNSLRAEDTAVYYCARRGE |
| | | GAMDYWGQGTTVTVSSGGGGSGGGGSGGGGSG |
| | | GGGSSNELTQPPSVSVSPGQTARITCRASSSVNYI |
| | | YWYQQKSGQAPVLVIYYTSNLAPGIPERFSGSGS |
| | | GNMYTLTISGAQVEDEADYYCQQFTSSPFTFGTG |
| | | TKVTVL |

Antibody B-H.4

| | | |
|---|---|---|
| SEQ ID NO: 1340 | scFv | QVQLVESGGGVVQPGRSLRLSCAASGFTFSNFG |
| | | MHWVRQAPGKGLEWVAYISSGSSTIYYADTLKG |
| | | RFTISRDNSKNTLYLQMNSLRAEDTAVYYCARR |
| | | GEGAMDYWGQGTTVTVSSGGGGSGGGGSGGGG |
| | | SGGGGSDNQLTQSPSFLSASVGDRVTITCRASSSV |
| | | NYIYWYQQKPGKAPKLLIYYTSNLAPGVPSRFSG |
| | | SGSGNEYTLTISSLQPEDFATYYCQQFTSSPFTFG |
| | | QGTKLEIK |

Antibody B-H.5

| | | |
|---|---|---|
| SEQ ID NO: 1341 | scFv | QVQLVESGGGVVQPGRSLRLSCAASGFTFSNFG |
| | | MHWVRQAPGKGLEWVAYISSGSSTIYYADTLKG |
| | | RFTISRDNSKNTLYLQMNSLRAEDTAVYYCARR |
| | | GEGAMDYWGQGTTVTVSSGGGGSGGGGSGGGG |
| | | SGGGGSDNQLTQSPSSLSASVGDRVTITCRASSSV |
| | | NYIYWYQQKPGKAPKLLIYYTSNLAPGVPSRFSG |
| | | SGSGNDYTLTISSLQPEDFATYYCQQFTSSPFTFG |
| | | QGTKLEIK |

Antibody B-H.6

| | | |
|---|---|---|
| SEQ ID NO: 1342 | scFv | QVQLVESGGGVVQPGRSLRLSCAASGFTFSNFG |
| | | MHWVRQAPGKGLEWVAYISSGSSTIYYADTLKG |
| | | RFTISRDNSKNTLYLQMNSLRAEDTAVYYCARR |
| | | GEGAMDYWGQGTTVTVSSGGGGSGGGGSGGGG |
| | | SGGGGSSNELTQPPSVSVSPGQTARITCRASSSVN |
| | | YIYWYQQKSGQAPVLVIYYTSNLAPGIPERFSGS |
| | | GSGNMYTLTISGAQVEDEADYYCQQFTSSPFTFG |
| | | TGTKVTVL |

TABLE 3
Constant region amino acid sequences of human IgG heavy chains and human kappa
light chain

| | | |
|---|---|---|
| Human kappa | LC | RTVAAPSVFI FPPSDEQLKS GTASVVCLLN NFYPREAKVQ |
| constant region | | WKVDNALQSG NSQESVTEQD SKDSTYSLSS TLTLSKADYE |
| SEQ ID NO: 39 | | KHKVYACEVT HQGLSSPVTK SFNRGEC |
| Human | LC | RTVAAPSVFIFPPSDEQLKSGTASVVCLLNNFYPREAKVQWKVDNALQ |
| Immunoglobulin | | SGNSQESVTEQDSKDSTYSLSSTLTLSKADYEKHKVYACEVTHQGLSSP |
| kappa constant | | VTKSFNRGEC |
| C region | | |
| SEQ ID NO: | | |
| 3644 | | |
| IgG4 (S228P) | HC | ASTKGPSVFPLAPCSRSTSESTAALGCLVKDYFPEPVTVSWNSGALTSG |
| mutant constant | | VHTFPAVLQSSGLYSLSSVVTVPSSSLGTKTYTCNVDHKPSNTKVDKR |
| region (EU | | VESKYGPPCPPCPAPEFLGGPSVFLFPPKPKDTLMISRTPEVTCVVVDVS |
| Numbering) | | QEDPEVQFNWYVDGVEVHNAKTKPREEQFNSTYRVVSVLTVLHQDW |
| SEQ ID NO: 40 | | LNGKEYKCKVSNKGLPSSIEKTISKAKGQPREPQVYTLPPSQEEMTKNQ |
| | | VSLTCLVKGFYPSDIAVEWESNGQPENNYKTTPPVLDSDGSFFLYSRLT |
| | | VDKSRWQEGNVFSCSVMHEALHNHYTQKSLSLSLG |
| IgG1 wild type | HC | ASTKGPSVFPLAPSSKSTSGGTAALGCLVKDYFPEPVTVSWNSGALTSG |
| SEQ ID NO: 41 | | VHTFPAVLQSSGLYSLSSVVTVPSSSLGTQTYICNVNHKPSNTKVDKRV |
| | | EPKSCDKTHTCPPCPAPELLGGPSVFLFPPKPKDTLMISRTPEVTCVVVD |
| | | VSHEDPEVKFNWYVDGVEVHNAKTKPREEQYNSTYRVVSVLTVLHQ |
| | | DWLNGKEYKCKVSNKALPAPIEKTISKAKGQPREPQVYTLPPSREEMT |
| | | KNQVSLTCLVKGFYPSDIAVEWESNGQPENNYKTTPPVLDSDGSFFLYS |
| | | KLTVDKSRWQQGNVFSCSVMHEALHNHYTQKSLSLSPGK |
| IgG1 (N297A) | HC | ASTKGPSVFPLAPSSKSTSGGTAALGCLVKDYFPEPVTVSWNSGALTSG |
| mutant constant | | VHTFPAVLQSSGLYSLSSVVTVPSSSLGTQTYICNVNHKPSNTKVDKRV |
| region (EU | | EPKSCDKTHTCPPCPAPELLGGPSVFLFPPKPKDTLMISRTPEVTCVVVD |
| Numbering) | | VSHEDPEVKFNWYVDGVEVHNAKTKPREEQYASTYRVVSVLTVLHQ |
| SEQ ID NO: 42 | | DWLNGKEYKCKVSNKALPAPIEKTISKAKGQPREPQVYTLPPSREEMT |
| | | KNQVSLTCLVKGFYPSDIAVEWESNGQPENNYKTTPPVLDSDGSFFLYS |
| | | KLTVDKSRWQQGNVFSCSVMHEALHNHYTQKSLSLSPGK |
| IgM constant | HC | GSASAPTLFPLVSCENSPSDTSSVAVGCLAQDFLPDSITFSWKYKNNSDI |
| delta CDC | | SSTRGFPSVLRGGKYAATSQVLLPSKDVMQGTDEHVVCKVQHPNGNK |
| (P311A, P313S) | | EKNVPLPVIAELPPKVSVFVPPRDGFFGNPRKSKLICQATGFSPRQIQVS |
| SEQ ID NO: 73 | | WLREGKQVGSGVTTDQVQAEAKESGPTTYKVTSTLTIKESDWLGQSM |
| | | FTCRVDHRGLTFQQNASSMCVPDQDTAIRVFAIPPSFASIFLTKSTKLTC |
| | | LVTDLTTYDSVTISWTRQNGEAVKTHTNISESHPNATFSAVGEASICED |
| | | DWNSGERFTCTVTHTDLASSLKQTISRPKGVALHRPDVYLLPPAREQL |
| | | NLRESATITCLVTGFSPADVFVQWMQRGQPLSPEKYVTSAPMPEPQAP |
| | | GRYFAHSILTVSEEEWNTGETYTCVVAHEALPNRVTERTVDKSTGKPT |
| | | LYNVSLVMSDTAGTCY |
| IgGA1 | HC | ASPTSPKVFPLSLCSTQPDGNVVIACLVQGFFPQEPLSVTWSESGQGVT |
| SEQ ID NO: 74 | | ARNFPPSQDASGDLYTTSSQLTLPATQCLAGKSVTCHVKHYTNPSQDV |
| | | TVPCPVPSTPPTPSPSTPPTPSPSCCHPRLSLHRPALEDLLLGSEANLTCT |
| | | LTGLRDASGVTFTWTPSSGKSAVQGPPERDLCGCYSVSSVLPGCAEPW |
| | | NHGKTFTCTAAYPESKTPLTATLSKSGNTFRPEVHLLPPPSEELALNELV |
| | | TLTCLARGFSPKDVLVRWLQGSQELPREKYLTWASRQEPSQGTTTFAV |
| | | TSILRVAAEDWKKGDTFSCMVGHEALPLAFTQKTIDRLAGKPTHVNVS |
| | | VVMAEVDGTCY |
| IgGA2 | HC | ASPTSPKVFPLSLDSTPQDGNVVVACLVQGFFPQEPLSVTWSESGQNVT |
| SEQ ID NO: 75 | | ARNFPPSQDASGDLYTTSSQLTLPATQCPDGKSVTCHVKHYTNSSQDV |
| | | TVPCRVPPPPPCCHPRLSLHRPALEDLLLGSEANLTCTLTGLRDASGATF |
| | | TWTPSSGKSAVQGPPERDLCGCYSVSSVLPGCAQPWNHGETFTCTAAH |
| | | PELKTPLTANITKSGNTFRPEVHLLPPPSEELALNELVTLTCLARGFSPK |
| | | DVLVRWLQGSQELPREKYLTWASRQEPSQGTTTYAVTSILRVAAEDW |
| | | KKGETFSCMVGHEALPLAFTQKTIDRMAGKPTHINVSVVMAEADGTC |
| | | Y |
| Human Ig_J | HC | MKNHLLFWGVLAVFIKAVHVKAQEDERIVLVDNKCKCARITSRIIRSSE |
| chain | | DPNEDIVERNIRIIVPLNNRENISDPTSPLRTRFVYHLSDLCKKCDPTEVE |
| SEQ ID NO: 76 | | LDNQIVTATQSNICDEDSATETCYTYDRNKCYTAVVPLVYGGETKMVE |
| | | TALTPDACYPD |
| Human | HC | ASTKGPSVFPLAPSSKSTSGGTAALGCLVKDYFPEPVTVSWNSGALTSG |
| Immunoglobulin | | VHTFPAVLQSSGLYSLSSVVTVPSSSLGTQTYICNVNHKPSNTKVDKKV |
| heavy chain | | EPKSCDKTHTCPPCPAPELLGGPSVFLFPPKPKDTLMISRTPEVTCVVVD |
| SEQ ID NO: | | VSHEDPEVKFNWYVDGVEVHNAKTKPREEQYASTYRVVSVLTVLHQ |
| 3645 | | DWLNGKEYKCKVSNKALPAPIEKTISKAKGQPREPQVYTLPPSREEMT |
| | | KNQVSLTCLVKGFYPSDIAVEWESNGQPENNYKTTPPVLDSDGSFFLYS |
| | | KLTVDKSRWQQGNVFSCSVMHEALHNHYTQKSLSLSPGK |
| Human | HC | ASTKGPSVFPLAPSSKSTSGGTAALGCLVKDYFPEPVTVSWNSGALTSG |
| Immunoglobulin | | VHTFPAVLQSSGLYSLSSVVTVPSSSLGTQTYICNVNHKPSNTKVDKKV |
| heavy chain | | EPKSCDKTHTCPPCPAPELLGGPSVFLFPPKPKDTLMISRTPEVTCVVVD |
| SEQ ID NO: | | VSHEDPEVKFNWYVDGVEVHNAKTKPREEQYASTYRVVSVLTVLHQ |
| 3646 | | DWLNGKEYKCKVSNKALPAPIEKTISKAKGQPREPQVYTLPPSREEMT |
| | | KNQVSLTCLVKGFYPSDIAVEWESNGQPENNYKTTPPVLDSDGSFFLYS |
| | | KLTVDKSRWQQGNVFSCSVMHEALHNHYTQKSLSLSPGKEPEA |
| Human | HC | ASTKGPSVFPLAPSSKSTSGGTAALGCLVKDYFPEPVTVSWNSGALTSG |
| Immunoglobulin | | VHTFPAVLQSSGLYSLSSVVTVPSSSLGTQTYICNVNHKPSNTKVDKRV |
| heavy chain | | EPKSCDKTHTCPPCPAPELLGGPSVFLFPPKPKDTLMISRTPEVTCVVVD |
| SEQ ID NO: | | VSHEDPEVKFNWYVDGVEVHNAKTKPREEQYNSTYRVVSVLTVLHQ |
| 3647 | | DWLNGKEYKCKVSNKALPAPIEKTISKAKGQPREPQVYTLPPSREEMT |
| | | KNQVSLTCLVKGFYPSDIAVEWESNGQPENNYKTTPPVLDSDGSFFLYS |
| | | KLTVDKSRWQQGNVFSCSVMHEALHNHYTQKSLSLSPGK |
| Human Fc Knob | HC | DKTHTCPPCPAPELLGGPSVFLEPPKPKDTLMISRTPEVTCVVVDVSHE |
| cys N297A | | DPEVKFNWYVDGVEVHNAKTKPREEQYASTYRVVSVLTVLHQDWLN |
| SEQ ID NO: | | GKEYKCKVSNKALPAPIEKTISKAKGQPREPQVYTLPPCREEMTKNQV |
| 3648 | | SLWCLVKGFYPSDIAVEWESNGQPENNYKTTPPVLDSDGSFFLYSKLT |
| | | VDKSRWQQGNVFSCSVMHEALHNHYTQKSLSLSPGK |
| Human IgG1 | HC | ASTKGPSVFPLAPSSKSTSGGTAALGCLVKDYFPEPVTVSWNSGALTSG |
| hole cys N297A | | VHTFPAVLQSSGLYSLSSVVTVPSSSLGTQTYICNVNHKPSNTKVDKRV |
| SEQ ID NO: | | EPKSCDKTHTCPPCPAPELLGGPSVFLFPPKPKDTLMISRTPEVTCVVVD |
| 3649 | | VSHEDPEVKFNWYVDGVEVHNAKTKPREEQYASTYRVVSVLTVLHQ |
| | | DWLNGKEYKCKVSNKALPAPIEKTISKAKGQPREPQVCTLPPSREEMT |
| | | KNQVSLSCAVKGFYPSDIAVEWESNGQPENNYKTTPPVLDSDGSFFLV |
| | | SKLTVDKSRWQQGNVFSCSVMHEALHNHYTQKSLSLSPGK |

TABLE 4
Exemplary Fc KiH mutations and optional Cysteine mutations

| | Knob | Hole |
|---|---|---|
| Position | Mutation | Mutation |
| T366 | T366W | T366S |
| L368 | — | L368A |
| Y407 | — | Y407V |

Additional Cysteine Mutations to form
a stabilizing disulfide bridge

| Position | Knob CH3 | Hole CH3 |
|---|---|---|
| S354 | S354C | — |
| Y349 | — | Y349C |

TABLE 5
TCRαV- and TCRβV-and related diseases or conditions

| Subfamily | Related conditions or diseases |
|---|---|
| TCRαV1 (including TCRαV1-1 and TCRα1-2) | multiple sclerosis |
| TCRαV2 | Crohn's disease |
| TCRαV4 | Celiac disease |
| TCRαV12 (TCRαV12-3) | Type I diabetes |
| TCRαV13 (including TCRαV13-1, TCRαV13-2) | Sjogren's syndrome |
| TCRαV20 | Celiac disease |
| TCRαV21 | ankylosing spondylitis |
| TCRαV22 | Crohn's disease |
| TCRαV26 (including TCRαV26-1, and | Celiac disease |
| TCRαV26-2) | |
| TCRαV40 | Crohn's disease |
| TCRαV41 | Joint implant failure |
| TCRβV4 | Celiac disease |
| TCRβV6 (including TCRβV6-1, TCRβV6-2/3, | Primary Sjogren's syndrome |
| and TCRβV6-5) | |
| TCRβV7 (including TCRβV7-1 and TCRβV7- | Amyotrophic lateral sclerosis; celiac disease; |
| 8/9) | multiple sclerosis |
| TCRβV9 | Ankylosing spondylitis |
| TCRβV10 (including TCRβV10-3) | Multiple sclerosis |
| TCRβV11 (including TCRβV11-2) | Covid-induced multisystem inflammatory |
| | syndrome in children |
| TCRβV12 (including TCRβV12-3/4) | Type I diabetes |
| TCRβV20 (including TCRβV20-1) | Multiple sclerosis |
| TCRβV23 | Amyotrophic lateral sclerosis |
| TCRβV29 (including TCRβV29-1) | Multiple sclerosis |

References:
He et al., (2012) Neoplasma. 59(6): 693-9
Howson et al. (2018) Nat. Commun. 9, 253
Tastan et al. (2018) Mucosal Immunol. 11, 1591-1605
Carnero et al., (2019) Front. Immunol. 10, 2690
Huang et al. (2019) Proc. Natl. Acad. Sci. U.S.A. 116, 8995-9001
Hong et al., (2022) Front Cell Infect Microbiol. 10; 12: 932373
Tan et al., (2010) Hematology, 15: 2, 81-87
Gedda et al., (2022) J Transl Med. 20(1): 587
Meermeier et al. (2016) Nat. Commun. 7, 12506
Yang et al., J Biol Chem. 2017 Nov. 10; 292(45): 18618-18627.
Surman et al., J Immunol. 2011 Jul. 15; 187(2): 835-41.
Motozono et al., 2014 Apr. 1; 192(7): 3428-34.
Brennan et al., (2007) J Virol. (13): 7269-73.
Huda et al., (2021) Leuk Lymphoma. 62(7): 1711-1720.
Petersen et al., 2016 Oct. 4; 24(10): 1643-1657.
Benati et al., J Clin Invest. 2016 Jun. 1; 126(6): 2093-108.
Frick et al., (2020) Eur J Immunol. 50(1): 142-145.
Valkenburg et al., (2016) Proc Natl Acad Sci USA. 113(16): 4440-5.
Lepore et al., (2017) Elife 6, e24476
Zhou et al., (2020) Cancer Cell Int. 20: 240.
Rowntree et al., (2020) J immunol; 205(6), 1524-1534
Crowther et al., (2020) Nat. Immunol. 21, 178-185
Xu et al., (2022) J Oncol. 3152114
Chen et al., (2021) Int J Mol Sci. 22(5): 2428
Bovay et al., (2018) Eur J Immunol. 48(2): 258-272.
Godfrey et al., (2015) Nat Immunol. 16(11): 1114-23.
Cole et al., (2009) J Biol Chem. 284(40): 27281-9.
Szeto et al., (2021) Cells. 2021 Oct. 3; 10(10): 2646.
Campisi et al., (2022) Nature. 606: 945-952.
Koirala et al., (2016) Mucosal Immunology; 9(3): 587-596.
Yohannes et al., (2017) Sci. Rep.; 7(17977).
Porritt et al., (2021) J Clin Invest.; 131(10): e146614.
Lu et al., (2022) eBioMedicine; 84: 104252.
Helliwell et al., (2005) Ann Rheum Dis; 64: 468-470.
Lossius et al., (2014) Eur. J. Immunol.; 44: 3439-3452.
Bulek et al., (2012) Nature Immunology; 13(3): 283-289.

TABLE 6
List of TCRβV subfamilies and subfamily members

| Subfamily | Subfamily members |
|---|---|
| TCRβ V6 | TCRβ V6-4*01, TCRβ V6-4*02, TCRβ V6-9*01, TCRβ V6-8*01, |
| Also referred to as: | TCRβ V6-5*01, TCRβ V6-6*02, TCRβ V6-6*01, TCRβ V6-2*01, |
| TCR VB 13.1 | TCRβ V6-3*01 or TCRβ V6-1*01. |
| TCRβ V10 | TCRβ V10-1*01, TCRβ V10-1*02, TCRβ V10-3*01 or TCRβ V10- |
| Also referred to as: | 2*01 |
| TCRβ V12 | |
| TCRβ V12 | TCRβ V12-4*01, TCRβ V12-3*01, or TCRβ V12-5*01 |
| Also referred to as: | |
| TCRβ V8.1 | |
| TCRβ V5 | TCRβ V5-5*01, TCRβ V5-6*01, TCRβ V5-4*01, TCRβ V5-8*01, |
| | TCRβ V5-1*01 |
| TCRβ V7 | TCRβ V7-7*01, TCRβ V7-6*01, TCRβ V7 -8*02, TCRβ V7 -4*01, |
| | TCRβ V7-2*02, TCRβ V7-2*03, TCRβ V7-2*01, TCRβ V7-3*01, |
| | TCRβ V7-9*03, or TCRβ V7-9*01 |
| TCRβ V11 | TCRβ V11-1*01, TCRβ V11-2*01 or TCRβ V11-3*01 |
| TCRβ V14 | TCRβ V14*01 |
| TCRβ V16 | TCRβ V16*01 |
| TCRβ V18 | TCRβ V18*01 |
| TCRβ V9 | TCRβ V9*01 or TCRβ V9*02 |
| TCRβ V13 | TCRβ V13*01 |
| TCRβ V4 | TCRβ V4-2*01, TCRβ V4-3*01, or TCRβ V4-1*01 |
| TCRβ V3 | TCRβ V3-1*01 |
| TCRβ V2 | TCRβ V2*01 |
| TCRβ V15 | TCRβ V15*01 |
| TCRβ V30 | TCRβ V30*01, or TCRβ V30*02 |
| TCRβ V19 | TCRβ V19*01, or TCRβ V19*02 |
| TCRβ V27 | TCRβ V27*01. |
| TCRβ V28 | TCRβ V28*01. |
| TCRβ V24 | TCRβ V24-1*01 |
| TCRβ V20 | TCRβ V20-1*01, or TCRβ V20-1*02 |
| TCRβ V25 | TCRβ V25-1*01 |
| TCRβ V29 | TCRβ V29-1*01 |

TABLE 7
Additional TCRβV subfamilies
Subfamily

TCRβ V1
TCRβ V17
TCRβ V21
TCRβ V23
TCRβ V26

TABLE 8
Alignment of TCRBV amino acid sequences (SEQ ID NOS 3457-3516, respectively, in
order of appearance)

| | FR1-IMGT CDR1-IMGT FR2-IMGT CDR2-IMGT FR3-IMGT CDR3-IMGT |
|---|---|
| | (1-26) (27-38) (39-55) (56-65) (66-104) (105-117) |
| Gene | A B BC C C′ C′C″ C″ D E F FG |
| | (1-15) (16-26) (27-38) (39-46) (47-55) (56-65) (66-74) (75-84) (85-96) |
| | (97-104) |
| | -------------------->------------------------->-------------->--- |
| | --------------->---------------->---------------------->----------- |
| | ----->------------------> |
| | 1 10 15 16 23 26 27 38 3941 46 47 55 56 65 66 74 75 84 85 89 96 97 |
| | 104 105 |
| | \|........\|....\|\|......\|..\|\|..........\|\|.\|....\|\|......\|\|........\|\|.......\| |
| | \|........\|\|...\|.....\|\|......\|\|..... |
| TRBV | DTGITQTPKYLVTAMGSKRTMKREHLGH........DSMYWYRQKAKKSLEFMFY |
| 1 | YNC....KEFIENKTVP.NHFTPECP.DSSRLYLHVVALQQEDSAAYLCTSSQ |
| TRBV | EPEVTQTPSHQVTQMGQEVILRCVPISNH.......LYFYWYRQILGQKVEFLVS |
| 2 | FYN....NEISEKSEIFDDQFSVERP.DGSNFTLKIRSTKLEDSAMYFCASSE |
| TRBV | DTAVSQTPKYLVTQMGNDKSIKCEQNLGH.......DTMYWYKQDSKKFLKIMFS |
| 3-1 | YNN....KELIINETVP.NRFSPKSP.DKAHLNLHINSLELGDSAVYFCASSQ |
| TRBV | DTAVSQTPKYLVTQMGKKESLK*EQNLGH.......NAMYWYKQDSKKFLKTMFI |
| 3-2 | YSN....KEPILNETVP.NRFSPDSP.DKAHLNLHINSLELGDSAVYFCASSQ |
| TRBV | DTEVTQTPKHLVMGMTNKKSLKCEQHMGH.......RAMYWYKQKAKKPPELMFV |
| 4-1 | YSY....EKLSINESVP.SRFSPECP.NSSLLNLHLHALQPEDSALYLCASSQ |
| TRBV | ETGVTQTPRHLVMGMTNKKSLKCEQHLGH.......NAMYWYKQSAKKPLELMFV |
| 4-2 | YNF....KEQTENNSVP.SRFSPECP.NSSHLFLHLHTLQPEDSALYLCASSQ |
| TRBV | ETGVTQTPRHLVMGMTNKKSLKCEQHLGH.......NAMYWYKQSAKKPLELMFV |
| 4-3 | YSL....EERVENNSVP.SRFSPECP.NSSHLFLHLHTLQPEDSALYLCASSQ |
| TRBV | KAGVTQTPRYLIKTRGQQVTLSCSPISGH.......RSVSWYQQTPGQGLQFLFE |
| 5-1 | YFS....ETQRNKGNFP.GRFSGRQF.SNSRSEMNVSTLELGDSALYLCASSL |
| TRBV | EAGVTQSPTHLIKTRGQQVTLRCSPISGH.......SSVSWYQQAPGQGPQFIFE |
| 5-3 | YAN....ELRRSEGNFP.NRFSGRQF.HDCCSEMNVSALELGDSALYLCARSL |
| TRBV | ETGVTQSPTHLIKTRGQQVTLRCSSQSGH.......NTVSWYQQALGQGPQFIFQ |
| 5-4 | YYR....EEENGRGNFP.PRFSGLQF.PNYSSELNVNALELDDSALYLCASSL |
| TRBV | DAGVTQSPTHLIKTRGQQVTLRCSPISGH.......KSVSWYQQVLGQGPQFIFQ |
| 5-5 | YYE....KEERGRGNFP.DRFSARQF.PNYSSELNVNALLLGDSALYLCASSL |
| TRBV | DAGVTQSPTHLIKTRGQQVTLRCSPKSGH.......DTVSWYQQALGQGPQFIFQ |
| 5-6 | YYE....EEERQRGNFP.DRFSGHQF.PNYSSELNVNALLLGDSALYLCASSL |
| TRBV | DAGVTQSPTHLIKTRGQHVTLRCSPISGH.......TSVSSYQQALGQGPQFIFQ |
| 5-7 | YYE....KEERGRGNFP.DQFSGHQF.PNYSSELNVNALLLGDSALYLCASSL |
| TRBV | EAGVTQSPTHLIKTRGQQATLRCSPISGH.......TSVYWYQQALGLGLQFLLW |
| 5-8 | YDE....GEERNRGNFP.PRFSGRQF.PNYSSELNVNALELEDSALYLCASSL |
| TRBV | NAGVTQTPKFQVLKTGQSMTLQCAQDMNH.......NSMYWYRQDPGMGLRLIYY |
| 6-1 | SAS....EGTTDKGEVP.NGYNVSRL.NKREFSLRLESAAPSQTSVYFCASSE |
| TRBV | NAGVTQTPKFRVLKTGQSMTLLCAQDMNH..EYMYWYRQDPGMGLRLIHY |
| 6-2 | SVG....EGTTAKGEVP.DGYNVSRL.KKQNFLLGLESAAPSQTSVYFCASSY |
| TRBV | NAGVTQTPKFRVLKTGQSMTLLCAQDMNH.......EYMYWYRQDPGMGLRLIHY |
| 6-3 | SVG....EGTTAKGEVP.DGYNVSRL.KKQNFLLGLESAAPSQTSVYFCASSY |
| TRBV | IAGITQAPTSQILAAGRRMTLRCTQDMRH.......NAMYWYRQDLGLGLRLIHY |
| 6-4 | SNT....AGTTGKGEVP.DGYSVSRA.NTDDFPLTLASAVPSQTSVYFCASSD |
| TRBV | NAGVTQTPKFQVLKTGQSMTLQCAQDMNH.......EYMSWYRQDPGMGLRLIHY |
| 6-5 | SVG....AGITDQGEVP.NGYNVSRS.TTEDFPLRLLSAAPSQTSVYFCASSY |
| TRBV | NAGVTQTPKFRILKIGQSMTLQCTQDMNH.......NYMYWYRQDPGMGLKLIYY |
| 6-6 | SVG....AGITDKGEVP.NGYNVSRS.TTEDFPLRLELAAPSQTSVYFCASSY |
| TRBV | NAGVTQTPKFHVLKTGQSMTLLCAQDMNH.......EYMYRYRQDPGKGLRLIYY |
| 6-7 | SVA....AALTDKGEVP.NGYNVSRS.NTEDFPLKLESAAPSQTSVYFCASSY |
| TRBV | NAGVTQTPKFHILKTGQSMTLQCAQDMNH.......GYMSWYRQDPGMGLRLIYY |
| 6-8 | SAA....AGTTDK.EVP.NGYNVSRL.NTEDFPLRLVSAAPSQTSVYLCASSY |
| TRBV | NAGVTQTPKFHILKTGQSMTLQCAQDMNH.......GYLSWYRQDPGMGLRRIHY |
| 6-9 | SVA....AGITDKGEVP.DGYNVSRS.NTEDFPLRLESAAPSQTSVYFCASSY |
| TRBV | GAGVSQSLRHKVAKKGKDVALRYDPISGH.......NALYWYRQSLGQGLEFPIY |
| 7-1 | FQG....KDAADKSGLPRDRFSAQRS.EGSISTLKFQRTQQGDLAVYLCASSS |
| TRBV | GAGVSQSPSNKVTEKGKDVELRCDPISGH.......TALYWYRQSLGQGLEFLIY |
| 7-2 | FQG....NSAPDKSGLPSDRFSAERT.GGSVSTLTIQRTQQEDSAVYLCASSL |
| TRBV | GAGVSQTPSNKVTEKGKYVELRCDPISGH.......TALYWYRQSLGQGPEFLIY |
| 7-3 | FQG....TGAADDSGLPNDRFFAVRP.EGSVSTLKIQRTERGDSAVYLCASSL |
| TRBV | GAGVSQSPRYKVAKRGRDVALRCDSISGH.......VTLYWYRQTLGQGSEVLTY |
| 7-4 | SQS....DAQRDKSGRPSGRFSAERP.ERSVSTLKIQRTEQGDSAVYLCASSL |
| TRBV | GAGVSQSPRYKVTKRGQDVALRCDPISGH......VSLYWYRQALGQGPEFLTY |
| 7-6 | FNY....EAQQDKSGLPNDRFSAERP.EGSISTLTIQRTEQRDSAMYRCASSL |
| TRBV | GAGVSQSPRYKVTKRGQDVTLRCDPISSH.......ATLYWYQQALGQGPEFLTY |
| 7-7 | FNY....EAQPDKSGLPSDRFSAERP.EGSISTLTIQRTEQRDSAMYRCASSL |
| TRBV | GAGVSQSPRYKVAKRGQDVALRCDPISGH....VSLFWYQQALGQGPEFLTY |
| 7-8 | FQN....EAQLDKSGLPSDRFFAERP.EGSVSTLKIQRTQQEDSAVYLCASSL |
| TRBV | DTGVSQNPRHKITKRGQNVTFRCDPISEH.......NRLYWYRQTLGQGPEFLTY |
| 7-9 | FQN....EAQLEKSRLLSDRFSAERP.KGSFSTLEIQRTEQGDSAMYLCASSL |
| TRBV | DSGVTQTPKHLITATGQRVTLRCSPRSGD.......LSVYWYQQSLDQGLQFLIQ |
| 9 | YYN....GEERAKGNIL.ERFSAQQF.PDLHSELNLSSLELGDSALYFCASSV |
| TRBV | DAEITQSPRHKITETGRQVTLACHQTWNH.......NNMFWYRQDLGHGLRLIHY |
| 10-1 | SYG....VQDTNKGEVS.DGYSVSRS.NTEDLPLTLESAASSQTSVYFCASSE |
| TRBV | DAGITQSPRYKITETGRQVTLMCHQTWSH.......SYMFWYRQDLGHGLRLIYY |
| 10-2 | SAA....ADITDKGEVP.DGYVVSRS.KTENFPLTLESATRSQTSVYFCASSE |
| TRBV | DAGITQSPRHKVTETGTPVTLRCHQTENH.......RYMYWYRQDPGHGLRLIHY |
| 10-3 | SYG....VKDTDKGEVS.DGYSVSRS.KTEDFLLTLESATSSQTSVYFCAISE |
| TRBV | EAEVAQSPRYKITEKSQAVAFWCDPISGH.......ATLYWYRQILGQGPELLVQ |
| 11-1 | FQD....ESVVDDSQLPKDRFSAERL.KGVDSTLKIQPAELGDSAMYLCASSL |
| TRBV | EAGVAQSPRYKIIEKRQSVAFWCNPISGH.......ATLYWYQQILGQGPKLLIQ |
| 11-2 | FQN....NGVVDDSQLPKDRFSAERL.KGVDSTLKIQPAKLEDSAVYLCASSL |
| TRBV | EAGVVQSPRYKIIEKKQPVAFWCNPISGH.......NTLYWYLQNLGQGPELLIR |
| 11-3 | YEN....EEAVDDSQLPKDRFSAERL.KGVDSTLKIQPAELGDSAVYLCASSL |
| TRBV | DAGVIQSPRHKVTEMGQSVTLRCEPISGH.......NDLLWYRQTFVQGLELLNY |
| 12-1 | FCS....WTLVDDSGVSKD*FSAQMP.DVSFSTLRIQPMEPRDLGLYFCASSF |
| TRBV | DAGIIQSPKHEVTEMGQTVTLRCEPIFGH.......NFLFWYRDTFVQGLELLSYFRS....*SI |
| 12-2 | IDNAGMPTERFSAERP.DGSFSTLKIQPAEQGDSAVYVCASRL |
| TRBV | DAGVIQSPRHEVTEMGQEVTLRCKPISGH.......NSLFWYRQTMMRGLELLIY |
| 12-3 | FNN....NVPIDDSGMPEDRFSAKMP.NASFSTLKIQPSEPRDSAVYFCASSL |
| TRBV | DAGVIQSPRHEVTEMGQEVTLRCKPISGH.......DYLFWYRQTMMRGLELLIY |
| 12-4 | FNN....NVPIDDSGMPEDRFSAKMP.NASFSTLKIQPSEPRDSAVYFCASSL |
| TRBV | DARVTQTPRHKVTEMGQEVTMRCQPILGH.......NTVFWYRQTMMQGLELLAY |
| 12-5 | FRN....RAPLDDSGMPKDRFSAEMP.DATLATLKIQPSEPRDSAVYFCASGL |
| TRBV | AAGVIQSPRHLIKEKRETATLKCYPIPRH.......DTVYWYQQGPGQDPQFLIS |
| 13 | FYE....KMQSDKGSIP.DRFSAQQF.SDYHSELNMSSLELGDSALYFCASSL |
| TRBV | EAGVTQFPSHSVIEKGQTVTLRCDPISGH.......DNLYWYRRVMGKEIKFLLH |
| 14 | FVK....ESKQDESGMPNNRFLAERT.GGTYSTLKVQPAELEDSGVYFCASSQ |
| TRBV | DAMVIQNPRYQVTQFGKPVTLSCSQTLNH.......NVMYWYQQKSSQAPKLLFH |
| 15 | YYD....KDFNNEADTP.DNFQSRRP.NTSFCFLDIRSPGLGDTAMYLCATSR |
| TRBV | GEEVAQTPKHLVRGEGQKAKLYCAPIKGH.......SYVFWYQQVLKNEFKFLIS |
| 16 | FQN....ENVFDETGMPKERFSAKCL.PNSPCSLEIQATKLEDSAVYFCASSQ |
| TRBV | EPGVSQTPRHKVTNMGQEVILRCDPSSGH.......MFVHWYRQNLRQEMKLLIS |
| 17 | FQY....QNIAVDSGMPKERFTAERP.NGTSSTLKIHPAEPRDSAVYLYSSG |
| TRBV | NAGVMQNPRHLVRRRGQEARLRCSPMKGH......SHVYWYRQLPEEGLKFMVY |
| 18 | LQK....ENIIDESGMPKERFSAEFP.KEGPSILRIQQVVRGDSAAYFCASSP |
| TRBV | DGGITQSPKYLFRKEGQNVTLSCEQNLNH.......DAMYWYRQDPGQGLRLIYY |
| 19 | SQI....VNDFQKGDIA.EGYSVSRE.KKESFPLTVTSAQKNPTAFYLCASSI |
| TRBV | GAVVSQHPSWVICKSGTSVKIECRSLDFQ......ATTMFWYRQFPKQSLMLMAT |
| 20-1 | SNEG...SKATYEQGVEKDKFLINHA.SLTLSTLTVTSAHPEDSSFYICSAR |
| TRBV | DTKVTQRPRLLVKASEQKAKMDCVPIKAH.......SYVYWYRKKLEEELKFLVY |
| 21-1 | FQN....EELIQKAEIINERFLAQCS.KNSSCTLEIQSTESGDTALYFCASSK |
| TRBV | HAKVTQTPGHLVKGKGQKTKMDCTPEKGH.......TFVYWYQQNQNKEFMLLIS |
| 23-1 | FQN....EQVLQETEMHKKRFSSQCP.KNAPCSLAILSSEPGDTALYLCASSQ |
| TRBV | DADVTQTPRNRITKTGKRIMLECSQTKGH.......DRMYWYRQDPGLGLRLIYY |
| 24-1 | SFD....VKDINKGEIS.DGYSVSRQ.AQAKFSLSLESAIPNQTALYFCATSDL |
| TRBV | EADIYQTPRYLVIGTGKKITLECSQTMGH.......DKMYWYQQDPGMELHLIHY |
| 25-1 | SYG....VNSTEKGDLS.SESTVSRI.RTEHFPLTLESARPSHTSQYLCASSE |
| TRBV | DAVVTQFPRHRIIGTGKEFILQCSQNMNH.......VTMYWYRQDPGLGLKLVYY |
| 26 | SPG....TGSTEKGDIS.EGYHVS*N.TIASFPLTLKSASTNQTSVYLYASSS |
| TRBV | EAQVTQNPRYLITVTGKKLTVTCSQNMNH.......EYMSWYRQDPGLGLRQIYY |
| 27 | SMN....VEVTDKGDVP.EGYKVSRK.EKRNFPLILESPSPNQTSLYFCASSL |
| TRBV | DVKVTQSSRYLVKRTGEKVFLECVQDMDH.......ENMFWYRQDPGLGLRLIYF |
| 28 | SYD....VKMKEKGDIP.EGYSVSRE.KKERFSLILESASTNQTSMYLCASSL |
| TRBV | SAVISQKPSRDICQRGTSLTIQCQVDSQV.......TMMFWYRQQPGQSLTLIAT |
| 29-1 | ANQG...SEATYESGFVIDKFPISRP.NLTFSTLTVSNMSPEDSSIYLCSVE |
| TRBV | SQTIHQWPATLVQPVGSPLSLECTVEGTS......NPNLYWYRQAAGRGLQLLFY |
| 30 | SVG.....IGQISSEVP.QNLSASRP.QDRQFILSSKKLLLSDSGFYLCAWS |

TABLE 9
Exemplary anti-TCRβV antibody molecules

| | | Reagents monoclonal antibodies | | |
|---|---|---|---|---|
| TRBV | TRBV | Clone name and | | |
| gene name | allele name | Specificity | Company product | Isotype |
| TRBV2 | TRBV2*01 | IsMMU 546 (TRBV2) | Serotec V BETA 22 | Mouse IgG1 |
| | TRBV2*02 | | Coulter Vbeta22 | |
| | TRBV2*03 | | | |
| TRBV3-1 | TRBV3-1*01 | FIN9 (TRBV3-1) | Serotec Vbeta9 | Mouse |
| | | | Coulter Vbeta9 | IgG2a |
| | TRBV3-1*02 | AMKB1-2 (TRBV3-1) | BD Biosciences Vbeta9 | Mouse IgG1 |
| TRBV4-1 | TRBV4-1*01 | ZOE (TRBV4-1, | Serotec V BETA 7 | Mouse |
| | | TRBV4-2, TRBV4-3) | Coulter Vbeta7 | IgG2a |
| | TRBV4-1*02 | 3G5 (TRBV4-1) | Pierce EndogenV beta 7.1 | Mouse |
| | | | | IgG2b |
| TRBV4-2 | TRBV4-2*01 | ZOE (TRBV4-1, | Serotec V BETA 7 | Mouse |
| | TRBV4-2*02 | TRBV4-2, TRBV4-3) | Coulter Vbeta7 | IgG2a |
| TRBV4-3 | TRBV4-3*01 | ZOE (TRBV4-1, | Serotec V BETA 7 | Mouse |
| | TRBV4-3*02 | TRBV4-2, TRBV4-3) | Coulter Vbeta7 | IgG2a |
| | TRBV4-3*03 | | | |
| | TRBV4-3*04 | ZIZOU4 (TRBV4-3) | Coulter Vbeta7.2 | Mouse |
| | | | | IgG2a |
| TRBV5-1 | TRBV5-1*01 | IMMU157 (TRBV5-1) | Serotec Vbeta5.1 | Mouse |
| | | | Coulter Vbeta5.1 | IgG2a |
| | TRBV5-1*02 | LC4 (TRBV5-1) | Pierce Endogen V beta 5(c) | Mouse IgG1 |
| | | | BD Biosciences Vbeta5(c) | |
| TRBV5-4 | TRBV5-4*01 | | | |
| | TRBV5-4*02 | | | |
| | TRBV5-4*03 | | | |
| | TRBV5-4*04 | | | |
| TRBV5-5 | TRBV5-5*01 | 3D11 (TRBV5-5) | Serotec VBETA5.3 | Mouse IgG1 |
| | | | Coulter Vbeta5.3 | |
| | TRBV5-5*02 | 1C1 (TRBV5-5, TRBV5-6) | Pierce Endogen V beta 5(a) | Mouse IgG1 |
| | | | BD Biosciences Vbeta5(a) | |
| | TRBV5-5*03 | W112 (TRBV5-5) | Pierce Endogen V beta 5(b) | Mouse IgG1 |
| | | | Serotec V beta 5.2/5.3 | |
| | | | BD Biosciences Vbeta5(b) | |
| | | MH3-2 (TRBV5-5, | BD Biosciences Vbeta5 | Mouse |
| | | TRBV5-6) | | IgG2a |
| | | 4H11 (TM27) as | | |
| | | disclosed in U.S. Pat. No. | | |
| | | 5,861,155 | | |
| TRBV5-6 | TRBV5-6*01 | 36213 (TRBV5-6) | Serotec Vbeta5.2 | Mouse IgG1 |
| | | 1C1 (TRBV5-5, TRBV5-6) | BD Biosciences Vbeta5(a) | Mouse IgG1 |
| | | MH3-2 (TRBV5-5, | BD Biosciences Vbeta5 | Mouse IgG2a |
| | | TRBV5-6) | | |
| TRBV5-8 | TRBV5-8*01 | | | |
| | TRBV5-8*02 | | | |
| TRBV6-1 | TRBV6-1*01 | BAM13 (TRBV6-1, | Pierce Endogen V beta 13 | Mouse IgG1 |
| | | TRBV6-5) | BD Biosciences Vbeta13.1, | |
| | | | 13.3 | |
| TRBV6-2 | TRBV6-2*01 | H132 | Coulter Vbeta13.2 | Mouse IgG1 |
| TRBV6-3 | TRBV6-3*01 | | | |
| TRBV6-4 | TRBV6-4*01 | | | |
| | TRBV6-4*02 | | | |
| TRBV6-5 | TRBV6-5*01 | IMMU 222 (TRBV6-5, | Serotec V BETA 13.1 | Mouse |
| | | TRBV6-6 and TRBV6-9) | Coulter Vbeta13.1 | IgG2b |
| | | BAM13 (TRBV6-1, | Pierce Endogen V beta 13 | Mouse IgG1 |
| | | TRBV6-5) | BD Biosciences Vbeta13.1, | |
| | | | 13.3 | |
| TRBV6-6 | TRBV6-6*01 | JU-74 (TRBV6-6) | Serotec Vbeta13.6 | Mouse IgG1 |
| | TRBV6-6*02 | JU74.3 (TRBV6-6) | Coulter Vbeta13.6 | |
| | TRBV6-6*03 | | | |
| | TRBV6-6*04 | IMMU 222 (TRBV6-5, | Serotec V BETA 13.1 | Mouse |
| | TRBV6-6*05 | TRBV6-6 and TRBV6-9) | Coulter Vbeta13.1 | IgG2b |
| TRBV6-8 | TRBV6-8*01 | | | |
| TRBV6-9 | TRBV6-9*01 | IMMU 222 (TRBV6-5, | Serotec V BETA 13.1 | Mouse |
| | | TRBV6-6 and TRBV6-9) | Coulter Vbeta13.1 | IgG2b |
| TRBV7-2 | TRBV7-2*01 | OT145 (TRBV7-2) | Pierce Endogen V beta 6.7 | Mouse IgG1 |
| | TRBV7-2*02 | | BD Biosciences Vbeta6.7 | |
| | TRBV7-2*03 | | | |
| | TRBV7-2*04 | | | |
| TRBV7-3 | TRBV7-3*01 | | | |
| | TRBV7-3*04 | | | |
| | TRBV7-3*05 | | | |
| TRBV7-4 | TRBV7-4*01 | | | |
| TRBV7-6 | TRBV7-6*01 | | | |
| | TRBV7-6*02 | | | |
| TRBV7-7 | TRBV7-7*01 | | | |
| | TRBV7-7*02 | | | |
| TRBV7-8 | TRBV7-8*01 | | | |
| | TRBV7-8*02 | | | |
| | TRBV7-8*03 | | | |
| TRBV7-9 | TRBV7-9*01 | | | |
| | TRBV7-9*02 | | | |
| | TRBV7-9*03 | | | |
| | TRVB7-9*04 | | | |
| | TRBV7-9*05 | | | |
| | TRBV7-9*06 | | | |
| | TRBV7-9*07 | | | |
| TRBV9 | TRBV9*01 | BL37.2 (TRBV9) | Serotec Vbeta1 | Rat IgG1 |
| | TRBV9*02 | | Coulter Vbeta1 | |
| | TRBV9*03 | | | |
| TRBV10-1 | TRBV10- | S511 (TRBV10-1, | Pierce Endogen V beta 12 | Mouse |
| | 1*01 | TRBV10-2, TRBV10-3) | BD Biosciences Vbeta12 | IgG2b |
| | TRBV10- | | | |
| | 1*02 | | | |
| TRBV10-2 | TRBV10- | | | |
| | 2*01 | | | |
| | TRBV10- | | | |
| | 2*02 | | | |
| TRBV10-3 | TRBV10- | VER2.32.1 (TRBV10-3) | Serotec Vbeta12 | Mouse |
| | 3*01 | S511 (TRBV10-1, | Coulter Vbeta12 | IgG2a |
| | TRBV10- | TRBV10-2, TRBV10-3) | | |
| | 3*02 | | | |
| | TRBV10- | | Pierce Endogen V beta 12 | Mouse |
| | 3*03 | | BD Biosciences Vbeta12 | IgG2b |
| | TRBV10- | | | |
| | 3*04 | | | |
| TRBV11-1 | TRBV11- | | | |
| | 1*01 | | | |
| TRBV11-2 | TRBV11- | IG125 (TRBV11-2) | Serotec Vbeta21.3 | Mouse |
| | 2*01 | | Coulter Vbeta21.3 | IgG2a |
| | TRBV11- | | | |
| | 2*02 | | | |
| | TRBV11- | | | |
| | 2*03 | | | |
| TRBV11-3 | TRBV11- | | | |
| | 3*01 | | | |
| | TRBV11- | | | |
| | 3*02 | | | |
| | TRBV11- | | | |
| | 3*03 | | | |
| | TRBV11- | | | |
| | 3*04 | | | |
| TRBV12-3 | TRBV12- | 56C5 (TRBV12-3, | Serotec Vbeta8.1/8.2 | Mouse |
| | 3*01 | TRBV12-4) | Coulter Vbeta8 | IgG2a |
| TRBV12-4 | TRBV12- | | Pierce Endogen V beta 8(a) | Mouse |
| | 4*01 | | BD Biosciences Vbeta8 | IgG2b |
| | TRBV12- | 56C5.2 (TRBV12-3, | Pierce Endogen V beta 8(b) | Mouse |
| | 4*02 | TRBV12-4) | | IgG2a |
| | | 16G8 (TRBV12-3, | BD Biosciences | Mouse |
| | | TRBV12-4) | Vbeta8 | IgG2b |
| | | MX-6 (TRBV12-3, | | |
| | | TRBV12-4) | | |
| | | JR2 (TRBV12-3, | | |
| | | TRBV12-4, TRBV12-5) | | |
| TRBV12-5 | TRBV12- | JR2 (TRBV12-3, | BD Biosciences Vbeta8 | Mouse |
| | 5*01 | TRBV12-4, TRBV12-5) | | IgG2b |
| TRBV13 | TRBV13*01 | AF-23 (TRBV13) | Serotec Vbeta23 | Mouse IgG1 |
| | TRBV13*02 | AF23 (TRBV13) | Coulter Vbeta23 | |
| | | AHUT7 (Vbeta23) | BD Biosciences Vbeta23 | |
| TRBV14 | TRBV14*01 | TAMAYA1.2 (TRBV14) | Serotec Vbeta16 | Mouse IgG1 |
| | TRBV14*02 | | Coulter Vbeta16 | |
| TRBV15 | TRBV15*01 | | | |
| | TRBV15*02 | | | |
| | TRBV15*03 | | | |
| TRBV16 | TRBV16*01 | | | |
| | TRBV16*03 | | | |
| TRBV18 | TRBV18*01 | BA62 (TRBV18) | Serotec V BETA 18 | Mouse IgG1 |
| | | BA62.6 (TRBV18) | Coulter Vbeta18 | |
| TRBV19 | TRBV19*01 | C1 (TRBV19) | Pierce Endogen V beta 17 | Mouse IgG1 |
| | | E17.5F3 (TRBV19) | BD Biosciences Vbeta17 | |
| | TRBV19*02 | | Serotec Vbeta17 | Mouse IgG1 |
| | TRBV19*03 | E17.5F3.15.13 | Coulter Vbeta17 | |
| | | (TRBV19) | | |
| TRBV20-1 | TRBV20- | MPB2D5 (TRBV20-1) | Serotec VBETA2 | Mouse IgG1 |
| | 1*01 | | Coulter Vbeta2 | |
| | TRBV20- | | | |
| | 1*02 | | | |
| | TRBV20- | | | |
| | 1*03 | | | |
| | TRBV20- | | | |
| | 1*04 | | | |
| | TRBV20- | | | |
| | 1*05 | | | |
| | TRBV20- | | | |
| | 1*06 | | | |
| | TRBV20- | | | |
| | 1*07 | | | |
| TRBV24-1 | TRBV24- | | | |
| | 1*01 | | | |
| TRBV25-1 | TRBV25- | C21 (TRBV25-1) | Serotec V BETA 11 | Mouse |
| | 1*01 | | Coulter Vbeta11 | IgG2a |
| TRBV27 | TRBV27*01 | CAS1.1.3 (TRBV27) | Serotec Vbeta14 | Mouse IgG1 |
| | | | Coulter Vbeta14 | |
| TRBV28 | TRBV28*01 | CH92 (TRBV28) | Serotec Vbeta3 | Mouse IgM |
| | | | Coulter Vbeta3 | |
| | | 8F10 (TRBV28) | Pierce Endogen V beta 3.1 | Mouse IgG1 |
| | | JOVI-3 (TRBV28) | BD Biosciences Vbeta3 | Mouse IgG2a |
| TRBV29-1 | TRBV29- | WJF24 | Coulter Vbeta4 | Rat IgM |
| | 1*01 | | | |
| | TRBV29- | | | |
| | 1*02 | | | |
| | TRBV29- | | | |
| | 1*03 | | | |
| TRBV30 | TRBV30*01 | ELL1.4 (TRBV30) | Serotec Vbeta20 | Mouse IgG1 |
| | TRBV30*02 | | Coulter Vbeta20 | |
| | TRBV30*04 | | | |
| | TRBV30*05 | | | |

TABLE 10
Amino acid sequences for anti TCRβ V5 antibodies. Amino acid and nucleotide
sequences for murine and humanized antibody molecules which bind to TCRVB 5 (e.g., TCRVB
5-5 or TCRVB 5-6). The amino acid the heavy and light chain CDRs, and the amino acid and
nucleotide sequences of the heavy and light chain variable regions, and the heavy and
light chains are shown.
Murine antibody C, also referred to as 4H11

| | | |
|---|---|---|
| SEQ ID NO: | HC CDR1 (Kabat) | AYGVN |
| 1315 | | |
| SEQ ID NO: | HC CDR2 (Kabat) | MIWGDGNTDYNSALKS |
| 1316 | | |
| SEQ ID NO: 1317 | HC CDR3 (Kabat) | DRVTATLYAMDY |
| SEQ ID NO: | HC CDR1 (Chothia) | GFSLTAY |
| 1318 | | |
| SEQ ID NO: | HC CDR2 (Chothia) | WGDGN |
| 1319 | | |
| SEQ ID NO: | HC CDR3 (Chothia) | DRVTATLYAMDY |
| 1317 | | |
| SEQ ID NO: | HC CDR1 | GFSLTAYGVN |
| 1320 | (Combined) | |
| SEQ ID NO: | HC CDR2 | MIWGDGNTDYNSALKS |
| 1316 | (Combined) | |
| SEQ ID NO: | HC CDR3(Combined) | DRVTATLYAMDY |
| 1317 | | |
| SEQ ID NO: | LC CDR1 (Kabat) | SASQGISNYLN |
| 1321 | | |
| SEQ ID NO: | LC CDR2 (Kabat) | YTSSLHS |
| 1322 | | |
| SEQ ID NO: | LC CDR3 (Kabat) | QQYSKLPRT |
| 1323 | | |
| SEQ ID NO: | LC CDR1 (Chothia) | SASQGISNYLN |
| 1321 | | |
| SEQ ID NO: | LC CDR2 (Chothia) | YTSSLHS |
| 1322 | | |
| SEQ ID NO: | LC CDR3 (Chothia) | QQYSKLPRT |
| 1323 | | |
| SEQ ID NO: | LC CDR1 (Combined) | SASQGISNYLN |
| 1321 | | |
| SEQ ID NO: | LC CDR2 (Combined) | YTSSLHS |
| 1322 | | |
| SEQ ID NO: | LC CDR3(Combined) | QQYSKLPRT |
| 1323 | | |
| SEQ ID NO: 232 | VH | DIQMTQTTSSLSASLGDRVTISCSASQGISNYLNWY |
| | | QQKPDGTVKLLIYYTSSLHSGVPSRFSGSGSGTDYS |
| | | LTISNLEPEDIATYYCQQYSKLPRTFGGGTKVEIK |
| SEQ ID NO: 233 | VL | QVQLKESGPGLVAPSQSLSITCTVSGFSLTAYGVN |
| | | WVRQPPGKGLEWLGMIWGDGNTDYNSALKSRLSI |
| | | SKDNSKSQVFLKMNSLQTDDTARYYCARDRVTAT |
| | | LYAMDYWGQGTSVTVSS |

Humanized antibody C
C-H-1 antibody

| | | |
|---|---|---|
| SEQ ID NO: | HC CDR1 (Kabat) | AYGVN |
| 1315 | | |
| SEQ ID NO: | HC CDR2 (Kabat) | MIWGDGNTDYNSALKS |
| 1316 | | |
| SEQ ID NO: 1317 | HC CDR3 (Kabat) | DRVTATLYAMDY |
| SEQ ID NO: | HC CDR1 (Chothia) | GFSLTAY |
| 1318 | | |
| SEQ ID NO: | HC CDR2 (Chothia) | WGDGN |
| 1319 | | |
| SEQ ID NO: | HC CDR3 (Chothia) | DRVTATLYAMDY |
| 1317 | | |
| SEQ ID NO: | HC CDR1 | GFSLTAYGVN |
| 1320 | (Combined) | |
| SEQ ID NO: | HC CDR2 | MIWGDGNTDYNSALKS |
| 1316 | (Combined) | |
| SEQ ID NO: | HC CDR3(Combined) | DRVTATLYAMDY |
| 1317 | | |
| SEQ ID NO: | LC CDR1 (Kabat) | SASQGISNYLN |
| 1321 | | |
| SEQ ID NO: | LC CDR2 (Kabat) | YTSSLHS |
| 1322 | | |
| SEQ ID NO: | LC CDR3 (Kabat) | QQYSKLPRT |
| 1323 | | |
| SEQ ID NO: | LC CDR1 (Chothia) | SASQGISNYLN |
| 1321 | | |
| SEQ ID NO: | LC CDR2 (Chothia) | YTSSLHS |
| 1322 | | |
| SEQ ID NO: | LC CDR3 (Chothia) | QQYSKLPRT |
| 1323 | | |
| SEQ ID NO: | LC CDR1 (Combined) | SASQGISNYLN |
| 1321 | | |
| SEQ ID NO: | LC CDR2 (Combined) | YTSSLHS |
| 1322 | | |
| SEQ ID NO: | LC CDR3(Combined) | QQYSKLPRT |
| 1323 | | |
| SEQ ID NO: | VL | DIQMTQSPSSLSASVGDRVTITCSASQGISNYLNWY |
| 1324 | | QQTPGKAPKLLIYYTSSLHSGVPSRFSGSGSGTDYTF |
| | | TISSLQPEDIATYYCQQYSKLPRTFGQGTKLQIT |
| SEQ ID NO: | VH | QVQLQESGPGLVRPSQTLSLTCTVSGFSLTAYGVN |
| 1325 | | WVRQPPGRGLEWLGMIWGDGNTDYNSALKSRVT |
| | | MLKDTSKNQFSLRLSSVTAADTAVYYCARDRVTA |
| | | TLYAMDYWGQGSLVTVSS |

Humanized antibody C Variable light chain (VL)

| | | | |
|---|---|---|---|
| SEQ ID NO: | VL | C-H-VL.1 | DIQMTQSPSFLSASVGDRVTITCSASQGISNYLNWY |
| 3000 | | | QQKPGKAVKLLIYYTSSLHSGVPSRFSGSGSGTEYT |
| | | | LTISSLQPEDFATYYCQQYSKLPRTFGGGTKVEIK |
| SEQ ID NO: | VL | C-H-VL.2 | DIQMTQSPSSLSASVGDRVTITCSASQGISNYLNWY |
| 3001 | | | QQKPGKAVKLLIYYTSSLHSGVPSRFSGSGSGTDY |
| | | | TLTISSLQPEDFATYYCQQYSKLPRTFGGGTKVEIK |
| SEQ ID NO: | VL | C-H-VL.3 | DIQMTQSPSSLSASVGDRVTITCSASQGISNYLNWY |
| 3002 | | | QQKPGKVVKLLIYYTSSLHSGVPSRFSGSGSGTDY |
| | | | TLTISSLQPEDVATYYCQQYSKLPRTFGGGTKVEIK |
| SEQ ID NO: | VL | C-H-VL.4 | DIQMTQSPSSLSASVGDRVTITCSASQGISNYLNWY |
| 3003 | | | QQKPGQAVKLLIYYTSSLHSGVPSRFSGSGSGTDY |
| | | | TLTISSLQPEDVATYYCQQYSKLPRTFGGGTKVEIK |
| SEQ ID NO: | VL | C-H-VL.5 | DIQMTQSPSSLSASVGDRVTITCSASQGISNYLNWY |
| 3004 | | | QQKPGKAVKLLIYYTSSLHSGVPSRFSGSGSGTDY |
| | | | TFTISSLQPEDIATYYCQQYSKLPRTFGGGTKVEIK |
| SEQ ID NO: | VL | C-H-VL.6 | DIQMTQSPSSLSASVGDRVTITCSASQGISNYLNWY |
| 3005 | | | QQKPGKTVKLLIYYTSSLHSGIPSRFSGSGSGTDYT |
| | | | LTIRSLQPEDFATYYCQQYSKLPRTFGGGTKVEIK |
| SEQ ID NO: | VL | C-H-VL.7 | AIQMTQSPSSLSASVGDRVTITCSASQGISNYLNWY |
| 3006 | | | QQKPGKAVKLLIYYTSSLHSGVPSRFSGSGSGTDY |
| | | | TLTISSLQPEDFATYYCQQYSKLPRTFGGGTKVEIK |
| SEQ ID NO: | VL | C-H-VL.8 | DIQMTQSPSSVSASVGDRVTITCSASQGISNYLNW |
| 3007 | | | YQQKPGKAVKLLIYYTSSLHSGVPSRFSGSGSGTD |
| | | | YTLTISSLQPEDFATYYCQQYSKLPRTFGGGTKVEI |
| | | | K |
| SEQ ID NO: | VL | C-H-VL.9 | DIQMTQSPSSLSASVGDRVTITCSASQGISNYLNWY |
| 3008 | | | QQKPGKAVKRLIYYTSSLHSGVPSRFSGSGSGTEY |
| | | | TLTISNLQPEDFATYYCQQYSKLPRTFGGGTKVEIK |
| SEQ ID NO: | VL | C-H-VL.10 | AIRMTQSPFSLSASVGDRVTITCSASQGISNYLNWY |
| 3009 | | | QQKPAKAVKLFIYYTSSLHSGVPSRFSGSGSGTDY |
| | | | TLTISSLQPEDFATYYCQQYSKLPRTFGGGTKVEIK |
| SEQ ID NO: | VL | C-H-VL.11 | DIQMTQSPSSLSASVGDRVTITCSASQGISNYLNWY |
| 3010 | | | QQKPGKAVKRLIYYTSSLHSGVPSRFSGSGSGTEY |
| | | | TLTISSLQPEDFATYYCQQYSKLPRTFGGGTKVEIK |
| SEQ ID NO: | VL | C-H-VL.12 | DIQMTQSPSTLSASVGDRVTITCSASQGISNYLNWY |
| 3011 | | | QQKPGKAVKLLIYYTSSLHSGVPSRFSGSGSGTEYT |
| | | | LTISSLQPDDFATYYCQQYSKLPRTFGGGTKVEIK |
| SEQ ID NO: 3012 | VL | C-H-VL.13 | DIQMTQSPSSLSASVGDRVTITCSASQGISNYLNWY |
| | | | QQKPGKAVKSLIYYTSSLHSGVPSRFSGSGSGTDY |
| | | | TLTISSLQPEDFATYYCQQYSKLPRTFGGGTKVEIK |
| SEQ ID NO: | VL | C-H-VL.14 | DIQMTQSPSSLSASVGDRVTITCSASQGISNYLNWY |
| 3013 | | | QQKPGKAVKSLIYYTSSLHSGVPSKFSGSGSGTDY |
| | | | TLTISSLQPEDFATYYCQQYSKLPRTFGGGTKVEIK |
| SEQ ID NO: | VL | C-H-VL.15 | DIQMTQSPSSLSASVGDRVTITCSASQGISNYLNWY |
| 3014 | | | QQKPEKAVKSLIYYTSSLHSGVPSRFSGSGSGTDYT |
| | | | LTISSLQPEDFATYYCQQYSKLPRTFGGGTKVEIK |
| SEQ ID NO: | VL | C-H-VL.16 | DIQMTQSPSAMSASVGDRVTITCSASQGISNYLNW |
| 3015 | | | YQQKPGKVVKRLIYYTSSLHSGVPSRFSGSGSGTE |
| | | | YTLTISSLQPEDFATYYCQQYSKLPRTFGGGTKVEI |
| | | | K |
| SEQ ID NO: | VL | C-H-VL.17 | DIVMTQSPDSLAVSLGERATINCSASQGISNYLNW |
| 3016 | | | YQQKPGQPVKLLIYYTSSLHSGVPDRFSGSGSGTD |
| | | | YTLTISSLQAEDVAVYYCQQYSKLPRTFGGGTKVE |
| | | | IK |
| SEQ ID NO: | VL | C-H-VL.18 | EIVMTQSPGTLSLSPGERATLSCSASQGISNYLNWY |
| 3017 | | | QQKPGQAVKLLIYYTSSLHSGIPDRFSGSGSGTDYT |
| | | | LTISRLEPEDFAVYYCQQYSKLPRTFGGGTKVEIK |
| SEQ ID NO: | VL | C-H-VL.19 | EIVMTQSPPTLSLSPGERVTLSCSASQGISNYLNWY |
| 3018 | | | QQKPGQAVKLLIYYTSSLHSGIPARFSGSGSGTDYT |
| | | | LTISSLQPEDFAVYYCQQYSKLPRTFGGGTKVEIK |
| SEQ ID NO: | VL | C-H-VL.20 | EIVMTQSPPTLSLSPGERVTLSCSASQGISNYLNWY |
| 3019 | | | QQKPGQAVKLLIYYTSSLHSSIPARFSGSGSGTDYT |
| | | | LTISSLQPEDFAVYYCQQYSKLPRTFGGGTKVEIK |
| SEQ ID NO: | VL | C-H-VL.21 | EIVMTQSPATLSLSPGERATLSCSASQGISNYLNWY |
| 3020 | | | QQKPGQAVKLLIYYTSSLHSGIPARFSGSGSGTDYT |
| | | | LTISSLEPEDFAVYYCQQYSKLPRTFGGGTKVEIK |
| SEQ ID NO: | VL | C-H-VL.22 | EIVMTQSPATLSLSPGERATLSCSASQGISNYLNWY |
| 3021 | | | QQKPGQAVKLLIYYTSSLHSGIPARFSGSGSGTDYT |
| | | | LTISRLEPEDFAVYYCQQYSKLPRTFGGGTKVEIK |
| SEQ ID NO: | VL | C-H-VL.23 | EIVMTQSPATLSLSPGERATLSCSASQGISNYLNWY |
| 3022 | | | QQKPGQAVKLLIYYTSSLHSGIPDRFSGSGSGTDYT |
| | | | LTISRLEPEDFAVYYCQQYSKLPRTFGGGTKVEIK |
| SEQ ID NO: | VL | C-H-VL.24 | EIVMTQSPATLSLSPGERATLSCSASQGISNYLNWY |
| 3023 | | | QQKPGLAVKLLIYYTSSLHSGIPDRFSGSGSGTDYT |
| | | | LTISRLEPEDFAVYYCQQYSKLPRTFGGGTKVEIK |
| SEQ ID NO: | VL | C-H-VL.25 | DIQMIQSPSFLSASVGDRVSIICSASQGISNYLNWYL |
| 3024 | | | QKPGKSVKLFIYYTSSLHSGVSSRFSGRGSGTDYTL |
| | | | TIISLKPEDFAAYYCQQYSKLPRTFGGGTKVEIK |
| SEQ ID NO: | VL | C-H-VL.26 | EIVMTQSPATLSLSPGERATLSCSASQGISNYLNWY |
| 3025 | | | QQKPGQAVKLLIYYTSSLHSGIPARFSGSGSGTDYT |
| | | | LTISSLQPEDFAVYYCQQYSKLPRTFGGGTKVEIK |
| SEQ ID NO: | VL | C-H-VL.27 | EIVMTQSPATLSLSPGERATLSCSASQGISNYLNWY |
| 3026 | | | QQKPGQAVKLLIYYTSSLHSGIPARFSGSGPGTDYT |
| | | | LTISSLEPEDFAVYYCQQYSKLPRTFGGGTKVEIK |
| SEQ ID NO: | VL | C-H-VL.28 | DIVMTQTPLSLSVTPGQPASISCSASQGISNYLNWY |
| 3027 | | | LQKPGQSVKLLIYYTSSLHSGVPDRFSGSGSGTDYT |
| | | | LKISRVEAEDVGVYYCQQYSKLPRTFGGGTKVEIK |
| SEQ ID NO: | VL | C-H-VL.29 | DIVMTQTPLSLSVTPGQPASISCSASQGISNYLNWY |
| 3028 | | | LQKPGQPVKLLIYYTSSLHSGVPDRFSGSGSGTDYT |
| | | | LKISRVEAEDVGVYYCQQYSKLPRTFGGGTKVEIK |
| SEQ ID NO: | VL | C-H-VL.30 | DIVMTQSPAFLSVTPGEKVTITCSASQGISNYLNWY |
| 3029 | | | QQKPDQAVKLLIYYTSSLHSGVPSRFSGSGSGTDY |
| | | | TFTISSLEAEDAATYYCQQYSKLPRTFGGGTKVEIK |
| SEQ ID NO: | VL | C-H-VL.31 | DIVMTQSPLSLPVTPGEPASISCSASQGISNYLNWY |
| 3030 | | | LQKPGQSVKLLIYYTSSLHSGVPDRFSGSGSGTDYT |
| | | | LKISRVEAEDVGVYYCQQYSKLPRTFGGGTKVEIK |
| SEQ ID NO: | VL | C-H-VL.32 | DIVMTQTPLSLPVTPGEPASISCSASQGISNYLNWY |
| 3031 | | | LQKPGQSVKLLIYYTSSLHSGVPDRFSGSGSGTDYT |
| | | | LKISRVEAEDVGVYYCQQYSKLPRTFGGGTKVEIK |
| SEQ ID NO: | VL | C-H-VL.33 | EIVMTQSPATLSVSPGERATLSCSASQGISNYLNWY |
| 3032 | | | QQKPGQAVKLLIYYTSSLHSGIPARFSGSGSGTEYT |
| | | | LTISILQSEDFAVYYCQQYSKLPRTFGGGTKVEIK |
| SEQ ID NO: | VL | C-H-VL.34 | EIVMTQSPATLSVSPGERATLSCSASQGISNYLNWY |
| 3033 | | | QQKPGQAVKLLIYYTSSLHSGIPARFSGSGSGTEYT |
| | | | LTISSLQSEDFAVYYCQQYSKLPRTFGGGTKVEIK |
| SEQ ID NO: | VL | C-H-VL.35 | DIVMTQSPLSLPVTLGQPASISCSASQGISNYLNWY |
| 3034 | | | QQRPGQSVKRLIYYTSSLHSGVPDRFSGSGSGTDY |
| | | | TLKISRVEAEDVGVYYCQQYSKLPRTFGGGTKVEI |
| | | | K |
| SEQ ID NO: | VL | C-H-VL.36 | EITMTQSPAFMSATPGDKVNISCSASQGISNYLNW |
| 3035 | | | YQQKPGEAVKFIIYYTSSLHSGIPPRFSGSGYGTDY |
| | | | TLTINNIESEDAAYYYCQQYSKLPRTFGGGTKVEIK |
| SEQ ID NO: | VL | C-H-VL.37 | DIVMTQTPLSSPVTLGQPASISCSASQGISNYLNWY |
| 3036 | | | QQRPGQPVKLLIYYTSSLHSGVPDRFSGSGAGTDY |
| | | | TLKISRVEAEDVGVYYCQQYSKLPRTFGGGTKVEI |
| | | | K |
| SEQ ID NO: | VL | C-H-VL.38 | EIVMTQSPDFQSVTPKEKVTITCSASQGISNYLNWY |
| 3037 | | | QQKPDQSVKLLIYYTSSLHSGVPSRFSGSGSGTDYT |
| | | | LTINSLEAEDAATYYCQQYSKLPRTFGGGTKVEIK |
| SEQ ID NO: | VL | C-H-VL.39 | EIVMTQTPLSLSITPGEQASISCSASQGISNYLNWYL |
| 3038 | | | QKARPVVKLLIYYTSSLHSGVPDRFSGSGSGTDYT |
| | | | LKISRVEAEDFGVYYCQQYSKLPRTFGGGTKVEIK |
| SEQ ID NO: | VL | C-H-VL.40 | EIVMTQTPLSLSITPGEQASMSCSASQGISNYLNWY |
| 3039 | | | LQKARPVVKLLIYYTSSLHSGVPDRFSGSGSGTDY |
| | | | TLKISRVEAEDFGVYYCQQYSKLPRTFGGGTKVEI |
| | | | K |

Humanized antibody C Variable HEAVY chain (VH)

| | | | |
|---|---|---|---|
| SEQ ID NO: | VH | C-H-VH.1 | QVTLKESGPVLVKPTETLTLTCTVSGFSLTAYGVN |
| 3040 | | | WVRQPPGKALEWLGMIWGDGNTDYNSALKSRLTI |
| | | | SKDNSKSQVVLTMTNMDPVDTATYYCARDRVTA |
| | | | TLYAMDYWGQGTLVTVSS |
| SEQ ID NO: | VH | C-H-VH.2 | QVTLKESGPALVKPTETLTLTCTVSGFSLTAYGVN |
| 3041 | | | WVRQPPGKALEWLGMIWGDGNTDYNSALKSRLII |
| | | | SKDNSKSQVVLTMTNMDPVDTATYYCARDRVTA |
| | | | TLYAMDYWGQGTLVTVSS |
| SEQ ID NO: | VH | C-H-VH.3 | QVTLKESGPALVKPTQTLTLTCTVSGFSLTAYGVN |
| 3042 | | | WVRQPPGKALEWLGMIWGDGNTDYNSALKSRLTI |
| | | | SKDNSKSQVVLTMTNMDPVDTATYYCARDRVTA |
| | | | TLYAMDYWGQGTLVTVSS |
| SEQ ID NO: | VH | C-H-VH.4 | QVQLQESGPGLVKPSGTLSLTCAVSGFSLTAYGVN |
| 3043 | | | WVRQPPGKGLEWLGMIWGDGNTDYNSALKSRLTI |
| | | | SKDNSKSQVSLKLSSVTAADTAVYYCARDRVTAT |
| | | | LYAMDYWGQGTLVTVSS |
| SEQ ID NO: | VH | C-H-VH.5 | QVTLKESGPTLVKPTQTLTLTCTVSGFSLTAYGVN |
| 3044 | | | WVRQPPGKALEWLGMIWGDGNTDYNSALKSRLTI |
| | | | TKDNSKSQVVLTMTNMDPVDTATYYCARDRVTA |
| | | | TLYAMDYWGQGTLVTVSS |
| SEQ ID NO: | VH | C-H-VH.6 | QVTLKESGPALVKPTQTLTLTCTVSGFSLTAYGVN |
| 3045 | | | WVRQPPGKALEWLGMIWGDGNTDYNSALKSRLTI |
| | | | TKDNSKSQVVLTMTNMDPVDTATYYCARDRVTA |
| | | | TLYAMDYWGQGTLVTVSS |
| SEQ ID NO: | VH | C-H-VH.7 | QVQLQESGPGLVKPSQTLSLTCTVSGFSLTAYGVN |
| 3046 | | | WVRQPPGKGLEWLGMIWGDGNTDYNSALKSRLTI |
| | | | SKDNSKSQVSLKLSSVTAADTAVYYCARDRVTAT |
| | | | LYAMDYWGQGTLVTVSS |
| SEQ ID NO: | VH | C-H-VH.8 | QVQLQESGPGLVKPSETLSLTCTVSGFSLTAYGVN |
| 3047 | | | WVRQPPGKGLEWLGMIWGDGNTDYNSALKSRLTI |
| | | | SKDNSKSQVSLKLSSVTAADTAVYYCARDRVTAT |
| | | | LYAMDYWGQGTLVTVSS |
| SEQ ID NO: | VH | C-H-VH.9 | QVQLQESGPGLVKPSQTLSLTCAVSGFSLTAYGVN |
| 3048 | | | WVRQPPGKGLEWLGMIWGDGNTDYNSALKSRLTI |
| | | | SKDNSKSQVSLKLSSVTAADTAVYYCARDRVTAT |
| | | | LYAMDYWGQGTLVTVSS |
| SEQ ID NO: | VH | C-H-VH.10 | QVQLQESGPGLVKPSDTLSLTCTVSGFSLTAYGVN |
| 3049 | | | WVRQPPGKGLEWLGMIWGDGNTDYNSALKSRLTI |
| | | | SKDNSKSQVSLKLSSVTAADTAVYYCARDRVTAT |
| | | | LYAMDYWGQGTLVTVSS |
| SEQ ID NO: | VH | C-H-VH.11 | QVQLQESGPGLVKPSQTLSLTCTVSGFSLTAYGVN |
| 3050 | | | WVRQHPGKGLEWLGMIWGDGNTDYNSALKSRLT |
| | | | ISKDNSKSQVSLKLSSVTAADTAVYYCARDRVTAT |
| | | | LYAMDYWGQGTLVTVSS |
| SEQ ID NO: | VH | C-H-VH.12 | QVQLQESGPGLVKPSQTLSLTCTVSGFSLTAYGVN |
| 3051 | | | WVRQPAGKGLEWLGMIWGDGNTDYNSALKSRLT |
| | | | ISKDNSKSQVSLKLSSVTAADTAVYYCARDRVTAT |
| | | | LYAMDYWGQGTLVTVSS |
| SEQ ID NO: | VH | C-H-VH.13 | QVQLQESGPGLVKPSQTLSLTCAVSGFSLTAYGVN |
| 3052 | | | WVRQPPGKGLEWLGMIWGDGNTDYNSALKSRLTI |
| | | | SKDNSKSQVSLKLSSVTAVDTAVYYCARDRVTAT |
| | | | LYAMDYWGQGTLVTVSS |
| SEQ ID NO: | VH | C-H-VH.14 | QVQLQESGPGLVKPSETLSLTCTVSGFSLTAYGVN |
| 3053 | | | WVRQPPGKGLEWLGMIWGDGNTDYNSALKSRLTI |
| | | | SKDNSKSHVSLKLSSVTAADTAVYYCARDRVTAT |
| | | | LYAMDYWGQGTLVTVSS |
| SEQ ID NO: | VH | C-H-VH.15 | QVQLQESGPGLVKPSETLSLTCAVSGFSLTAYGVN |
| 3054 | | | WVRQPPGKGLEWLGMIWGDGNTDYNSALKSRLTI |
| | | | SKDNSKSQVSLKLSSVTAADTAVYYCARDRVTAT |
| | | | LYAMDYWGQGTLVTVSS |
| SEQ ID NO: | VH | C-H-VH.16 | QVQLQESGPGLVKPSQTLSLTCAVYGFSLTAYGVN |
| 3055 | | | WVRQPPGKGLEWLGMIWGDGNTDYNSALKSRLTI |
| | | | SKDNSKSQVSLKLSSVTAADTAVYYCARDRVTAT |
| | | | LYAMDYWGQGTLVTVSS |
| SEQ ID NO: | VH | C-H-VH.17 | RVQLQESGPGLVKPSETLSLTCTVSGFSLTAYGVN |
| 3056 | | | WVRQPPGKGLEWLGMIWGDGNTDYNSALKSRLTI |
| | | | SKDNSKSQVPLKLSSVTAADTAVYYCARDRVTAT |
| | | | LYAMDYWGQGTLVTVSS |
| SEQ ID NO: | VH | C-H-VH.18 | QVQLQESGPGLVKPSQTLSLTCTVSGFSLTAYGVN |
| 3057 | | | WVRQHPGKGLEWLGMIWGDGNTDYNSALKSLLT |
| | | | ISKDNSKSQVSLKLSSVTAADTAVYYCARDRVTAT |
| | | | LYAMDYWGQGTLVTVSS |
| SEQ ID NO: | VH | C-H-VH.19 | QVQLQESGPGLVKPSDTLSLTCAVSGFSLTAYGVN |
| 3058 | | | WVRQPPGKGLEWLGMIWGDGNTDYNSALKSRLTI |
| | | | SKDNSKSQVSLKLSSVTALDTAVYYCARDRVTAT |
| | | | LYAMDYWGQGTLVTVSS |
| SEQ ID NO: | VH | C-H-VH.20 | QVQLQESGPGLVKPSDTLSLTCAVSGFSLTAYGVN |
| 3059 | | | WVRQPPGKGLEWLGMIWGDGNTDYNSALKSRLTI |
| | | | SKDNSKSQVSLKLSSVTAVDTAVYYCARDRVTAT |
| | | | LYAMDYWGQGTLVTVSS |
| SEQ ID NO: | VH | C-H-VH.21 | QVQLQESGSGLVKPSQTLSLTCAVSGFSLTAYGVN |
| 3060 | | | WVRQPPGKGLEWLGMIWGDGNTDYNSALKSRLTI |
| | | | SKDNSKSQVSLKLSSVTAADTAVYYCARDRVTAT |
| | | | LYAMDYWGQGTLVTVSS |
| SEQ ID NO: | VH | C-H-VH.22 | EVQLVESGGGLVQPGRSLRLSCTVSGFSLTAYGVN |
| 3061 | | | WVRQAPGKGLEWLGMIWGDGNTDYNSALKSRLT |
| | | | ISKDNSKSIVYLQMNSLKTEDTAVYYCARDRVTAT |
| | | | LYAMDYWGQGTLVTVSS |
| SEQ ID NO: | VH | C-H-VH.23 | EVQLVESGGGLVQPGPSLRLSCTVSGFSLTAYGVN |
| 3062 | | | WVRQAPGKGLEWLGMIWGDGNTDYNSALKSRLT |
| | | | ISKDNSKSIVYLQMNSLKTEDTAVYYCARDRVTAT |
| | | | LYAMDYWGQGTLVTVSS |
| SEQ ID NO: | VH | C-H-VH.24 | QVQLQESGSGLVKPSQTLSLTCAVSGFSLTAYGVN |
| 3063 | | | WVRQSPGKGLEWLGMIWGDGNTDYNSALKSRLTI |
| | | | SKDNSKSQVSLKLSSVTAADTAVYYCARDRVTAT |
| | | | LYAMDYWGQGTLVTVSS |
| SEQ ID NO: | VH | C-H-VH.25 | QVQLQESGPGLVKPSETLSLTCTVSGFSLTAYGVN |
| 3064 | | | WVRQPAGKGLEWLGMIWGDGNTDYNSALKSRLT |
| | | | ISKDNSKSQVSLKLSSVTAADTAVYYCARDRVTAT |
| | | | LYAMDYWGQGTLVTVSS |
| SEQ ID NO: | VH | C-H-VH.26 | EVQLVESGGGLVKPGRSLRLSCTVSGFSLTAYGVN |
| 3065 | | | WVRQAPGKGLEWLGMIWGDGNTDYNSALKSRLT |
| | | | ISKDNSKSIVYLQMNSLKTEDTAVYYCARDRVTAT |
| | | | LYAMDYWGQGTLVTVSS |
| SEQ ID NO: | VH | C-H-VH.27 | QVQLQESGPGLVKPSETLSLTCAVYGFSLTAYGVN |
| 3066 | | | WVRQPPGKGLEWLGMIWGDGNTDYNSALKSRLTI |
| | | | SKDNSKSQVYLKLSSVTAADTAVYYCARDRVTAT |
| | | | LYAMDYWGQGTLVTVSS |
| SEQ ID NO: | VH | C-H-VH.28 | QVQLQESGPGLVKPSDTLSLTCAVSGFSLTAYGVN |
| 3067 | | | WVRQPPGKGLEWLGMIWGDGNTDYNSALKSRLTI |
| | | | SKDNSKSQVSLKLSSVTAVDTGVYYCARDRVTAT |
| | | | LYAMDYWGQGTLVTVSS |
| SEQ ID NO: | VH | C-H-VH.29 | EVQLVESGGGLVQPGGSLRLSCAVSGFSLTAYGVN |
| 3068 | | | WVRQAPGKGLEWLGMIWGDGNTDYNSALKSRLT |
| | | | ISKDNSKSSVYLQMNSLKTEDTAVYYCARDRVTA |
| | | | TLYAMDYWGQGTLVTVSS |
| SEQ ID NO: | VH | C-H-VH.30 | EVQLVESGGGLVKPGGSLRLSCAVSGFSLTAYGVN |
| 3069 | | | WVRQAPGKGLEWLGMIWGDGNTDYNSALKSRLT |
| | | | ISKDNSKSTVYLQMNSLKTEDTAVYYCARDRVTA |
| | | | TLYAMDYWGQGTLVTVSS |
| SEQ ID NO: | VH | C-H-VH.31 | QVQLQQSGPGLVKPSQTLSLTCAVSGFSLTAYGVN |
| 3070 | | | WVRQSPSRGLEWLGMIWGDGNTDYNSALKSRLTI |
| | | | NKDNSKSQVSLQLNSVTPEDTAVYYCARDRVTAT |
| | | | LYAMDYWGQGTLVTVSS |
| SEQ ID NO: | VH | C-H-VH.32 | QVQLVESGGGLVQPGGSLRLSCSVSGFSLTAYGVN |
| 3071 | | | WVRQAPGKGLEWLGMIWGDGNTDYNSALKSRLT |
| | | | ISKDNSKSTVYLQMNSLRAEDTAVYYCARDRVTA |
| | | | TLYAMDYWGQGTLVTVSS |
| SEQ ID NO: | VH | C-H-VH.33 | QVQLQQWGAGLLKPSETLSLTCAVYGFSLTAYGV |
| 3072 | | | NWVRQPPGKGLEWLGMIWGDGNTDYNSALKSRL |
| | | | TISKDNSKSQVSLKLSSVTAADTAVYYCARDRVTA |
| | | | TLYAMDYWGQGTLVTVSS |
| SEQ ID NO: | VH | C-H-VH.34 | QVQLVESGGGVVQPGRSLRLSCAVSGFSLTAYGV |
| 3073 | | | NWVRQAPGKGLEWLGMIWGDGNTDYNSALKSRL |
| | | | TISKDNSTSTVFLQMNSLRAEDTAVYYCARDRVTA |
| | | | TLYAMDYWGQGTLVTVSS |
| SEQ ID NO: | VH | C-H-VH.35 | EVQLVESGGGLVQPGGSLRLSCAVSGFSLTAYGVN |
| 3074 | | | WVRQAPGKGLEWLGMIWGDGNTDYNSALKSRLT |
| | | | ISKDNSKSTVYLQMNSLRAEDTAVYYCARDRVTA |
| | | | TLYAMDYWGQGTLVTVSS |
| SEQ ID NO: | VH | C-H-VH.36 | EVQLVESGGGLVQPGGSLRLSCAVSGFSLTAYGVN |
| 3075 | | | WVRQAPGKGLEWLGMIWGDGNTDYNSALKSRLT |
| | | | ISKDNAKSSVYLQMNSLRDEDTAVYYCARDRVTA |
| | | | TLYAMDYWGQGTLVTVSS |
| SEQ ID NO: | VH | C-H-VH.37 | EVQLLESGGGLVQPGGSLRLSCAVSGFSLTAYGVN |
| 3076 | | | WVRQAPGKGLEWLGMIWGDGNTDYNSALKSRLT |
| | | | ISKDNSKSTVYLQMNSLRAEDTAVYYCARDRVTA |
| | | | TLYAMDYWGQGTLVTVSS |
| SEQ ID NO: | VH | C-H-VH.38 | QVQLVESGGGLVKPGGSLRLSCAVSGFSLTAYGV |
| 3077 | | | NWVRQAPGKGLEWLGMIWGDGNTDYNSALKSRL |
| | | | TISKDNAKSSVYLQMNSLRAEDTAVYYCARDRVT |
| | | | ATLYAMDYWGQGTLVTVSS |
| SEQ ID NO: | VH | C-H-VH.39 | EVQLVESGGGLVQPGGSLKLSCAVSGFSLTAYGV |
| 3078 | | | NWVRQASGKGLEWLGMIWGDGNTDYNSALKSRL |
| | | | TISKDNSKSTVYLQMNSLKTEDTAVYYCARDRVT |
| | | | ATLYAMDYWGQGTLVTVSS |
| SEQ ID NO: | VH | C-H-VH.40 | QVQLLESGGGLVKPGGSLRLSCAVSGFSLTAYGVN |
| 3079 | | | WVRQAPGKGLEWLGMIWGDGNTDYNSALKSRLT |
| | | | ISKDNAKSSVYLQMNSLRAEDTAVYYCARDRVTA |
| | | | TLYAMDYWGQGTLVTVSS |
| SEQ ID NO: | VH | C-H-VH.41 | QVQLVESGGGVVQPGRSLRLSCAVSGFSLTAYGV |
| 3080 | | | NWVRQAPGKGLEWLGMIWGDGNTDYNSALKSRL |
| | | | TISKDNSKSTVYLQMNSLRAEDTAVYYCARDRVT |
| | | | ATLYAMDYWGQGTLVTVSS |
| SEQ ID NO: | VH | C-H-VH.42 | QVQLVESGGGVVQPGRSLRLSCAVSGFSLTAYGV |
| 3081 | | | NWVRQAPGKGLEWLGMIWGDGNTDYNSALKSRL |
| | | | TISKDNSKSRVYLQMNSLRAEDTAVYYCARDRVT |
| | | | ATLYAMDYWGQGTLVTVSS |
| SEQ ID NO: | VH | C-H-VH.43 | QVQLVESGGGVVQPGRSLRLSCAVSGFSLTAYGV |
| 3082 | | | NWVRQAPGKGLEWLGMIWGDGNTDYNSALKSRL |
| | | | AISKDNSKSTVYLQMNSLRAEDTAVYYCARDRVT |
| | | | ATLYAMDYWGQGTLVTVSS |
| SEQ ID NO: | VH | C-H-VH.44 | QVQLVESGGGVVQPGGSLRLSCAVSGFSLTAYGV |
| 3083 | | | NWVRQAPGKGLEWLGMIWGDGNTDYNSALKSRL |
| | | | TISKDNSKSTVYLQMNSLRAEDTAVYYCARDRVT |
| | | | ATLYAMDYWGQGTLVTVSS |
| SEQ ID NO: | VH | C-H-VH.45 | EVQLVESGGGLVQPGGSLRLSCAVSGFSLTAYGVN |
| 3084 | | | WVRQAPGKGLEWLGMIWGDGNTDYNSALKSRLT |
| | | | ISKDNAKSTVYLQMNSLRAEDTAVYYCARDRVTA |
| | | | TLYAMDYWGQGTLVTVSS |
| SEQ ID NO: | VH | C-H-VH.46 | EVQLVESGGGLVQPGGSLRLSCAVSGFSLTAYGVN |
| 3085 | | | WVRQAPGKGLEWLGMIWGDGNTDYNSALKSRLT |
| | | | ISKDNAKSSVYLQMNSLRAEDTAVYYCARDRVTA |
| | | | TLYAMDYWGQGTLVTVSS |
| SEQ ID NO: | VH | C-H-VH.47 | EVQLVESGGVVVQPGGSLRLSCAVSGFSLTAYGV |
| 3086 | | | NWVRQAPGKGLEWLGMIWGDGNTDYNSALKSRL |
| | | | TISKDNSKSSVYLQMNSLRTEDTALYYCARDRVTA |
| | | | TLYAMDYWGQGTLVTVSS |
| SEQ ID NO: | VH | C-H-VH.48 | EVQLVESGGGLVQPGGSLRLSCAVSGFSLTAYGVN |
| 3087 | | | WVRQAPGKGLEWLGMIWGDGNTDYNSALKSRLT |
| | | | ISKHNSKSTVYLQMNSLRAEDTAVYYCARDRVTA |
| | | | TLYAMDYWGQGTLVTVSS |
| SEQ ID NO: | VH | C-H-VH.49 | EVQLVESGGGLVKPGGSLRLSCAVSGFSLTAYGVN |
| 3088 | | | WVRQAPGKGLEWLGMIWGDGNTDYNSALKSRLT |
| | | | ISKDNAKSSVYLQMNSLRAEDTAVYYCARDRVTA |
| | | | TLYAMDYWGQGTLVTVSS |
| SEQ ID NO: | VH | C-H-VH.50 | EVQLVESGGGLIQPGGSLRLSCAVSGFSLTAYGVN |
| 3089 | | | WVRQPPGKGLEWLGMIWGDGNTDYNSALKSRLTI |
| | | | SKDNSKSTVYLQMNSLRAEDTAVYYCARDRVTAT |
| | | | LYAMDYWGQGTLVTVSS |

TABLE 11
Amino acid sequences for anti TCRβ V5 antibodies. Amino acid and nucleotide
sequences for murine and humanized antibody molecules which bind to TCRVB 5 (e.g., TCRVB
5-5 or TCRVB 5-6). The amino acid the heavy and light chain CDRs, and the amino acid and
nucleotide sequences of the heavy and light chain variable regions, and the heavy and
light chains are shown.
Murine antibody E, also referred to as MH3-2

| | | |
|---|---|---|
| SEQ ID NO: | HC CDR1 (Kabat) | SSWMN |
| 1298 | | |
| SEQ ID NO: | HC CDR2 (Kabat) | RIYPGDGDTKYNGKFKG |
| 1299 | | |
| SEQ ID NO: | HC CDR3 (Kabat) | RGTGGWYFDV |
| 1300 | | |
| SEQ ID NO: | HC CDR1 (Chothia) | GYAFSSS |
| 1302 | | |
| SEQ ID NO: | HC CDR2 (Chothia) | YPGDGD |
| 1303 | | |
| SEQ ID NO: | HC CDR3 (Chothia) | RGTGGWYFDV |
| 1301 | | |
| SEQ ID NO: | HC CDR1 | GYAFSSSWMN |
| 1304 | (Combined) | |
| SEQ ID NO: | HC CDR2 | RIYPGDGDTKYNGKFKG |
| 1299 | (Combined)) | |
| SEQ ID NO: | HC CDR3(Combined) | RGTGGWYFDV |
| 1301 | | |
| SEQ ID NO: | LC CDR1 (Kabat) | RASESVDSSGNSFMH |
| 1305 | | |
| SEQ ID NO: | LC CDR2 (Kabat) | RASNLES |
| 1306 | | |
| SEQ ID NO: | LC CDR3 (Kabat) | QQSFDDPFT |
| 1307 | | |
| SEQ ID NO: | LC CDR1 (Chothia) | SESVDSSGNSF |
| 1308 | | |
| SEQ ID NO: | LC CDR2 (Chothia) | RASNLES |
| 1306 | | |
| SEQ ID NO: | LC CDR3 (Chothia) | QQSFDDPFT |
| 1307 | | |
| SEQ ID NO: | LC CDR1 (Combined) | RASESVDSSGNSFMH |
| 1305 | | |
| SEQ ID NO: | LC CDR2 (Combined) | RASNLES |
| 1306 | | |
| SEQ ID NO: | LC CDR3(Combined) | QQSFDDPFT |
| 1307 | | |
| SEQ ID NO: | VH | QVQLQQSGPELVKPGASVKISCKASGYAFSSSWM |
| 3091 | | NWVKQRPGQGLEWIGRIYPGDGDTKYNGKFKGK |
| | | ATLTADKSSSTAYMHLSSLTSVDSAVYFCARRGTG |
| | | GWYFDVWGAGTTVTVSS |
| SEQ ID NO: | Heavy chain | METDTLLLWVLLLWVPGSTGQVQLQQSGPELVKP |
| 3284 | | GASVKISCKASGYAFSSSWMNWVKQRPGQGLEWI |
| | | GRIYPGDGDTKYNGKFKGKATLTADKSSSTAYMH |
| | | LSSLTSVDSAVYFCARRGTGGWYFDVWGAGTTVT |
| | | VSSAKTTAPSVYPLAPVCGDTTGSSVTLGCLVKGY |
| | | FPEPVTLTWNSGSLSSGVHTFPAVLQSDLYTLSSSV |
| | | TVTSSTWPSQSITCNVAHPASSTKVDKKIEPRGPTI |
| | | KPCPPCKCPAPNLLGGPSVFIFPPKIKDVLMISLSPIV |
| | | TCVVVDVSEDDPDVQISWFVNNVEVHTAQTQTHR |
| | | EDYNSTLRVVSALPIQHQDWMSGKEFKCKVNNKD |
| | | LPAPIERTISKPKGSVRAPQVYVLPPPEEEMTKKQV |
| | | TLTCMVTDFMPEDIYVEWTNNGKTELNYKNTEPV |
| | | LDSDGSYFMYSKLRVEKKNWVERNSYSCSVVHEG |
| | | LHNHHTTKSFSRTPGK |
| SEQ ID NO: | VL | DIVLTQSPASLAVSLGQRATISCRASESVDSSGNSF |
| 3092 | | MHWYQQKPGQPPQLLIYRASNLESGIPARFSGSGS |
| | | RTDFTLTINPVEADDVATFYCQQSFDDPFTFGSGTK |
| | | LEIK |
| SEQ ID NO: | Light chain | METDTLLLWVLLLWVPGSTGDIVLTQSPASLAVSL |
| 3285 | | GQRATISCRASESVDSSGNSFMHWYQQKPGQPPQL |
| | | LIYRASNLESGIPARFSGSGSRTDFTLTINPVEADDV |
| | | ATFYCQQSFDDPFTFGSGTKLEIKRADAAPTVSIFP |
| | | PSSEQLTSGGASVVCFLNNFYPKDINVKWKIDGSE |
| | | RQNGVLNSWTDQDSKDSTYSMSSTLTLTKDEYER |
| | | HNSYTCEATHKTSTSPIVKSFNRNEC |

Humanized antibody E (E-H antibody)
Variable light chain (VL)

| | | | |
|---|---|---|---|
| SEQ ID NO: | VL | E-H.1 | DIVLTQSPDSLAVSLGERATINCRASESVDSSGNSFMHW |
| 3093 | | | YQQKPGQPPQLLIYRASNLESGVPDRFSGSGSRTDFTLT |
| | | | ISSLQAEDVAVYYCQQSFDDPFTFGQGTKLEIK |
| SEQ ID NO: | VL | E-H.2 | EIVLTQSPATLSLSPGERATLSCRASESVDSSGNSFMHW |
| 3094 | | | YQQKPGQAPQLLIYRASNLESGIPARFSGSGSRTDFTLTI |
| | | | SSLEPEDFAVYYCQQSFDDPFTFGQGTKLEIK |
| SEQ ID NO: | VL | E-H.3 | EIVLTQSPATLSLSPGERATLSCRASESVDSSGNSFMHW |
| 3095 | | | YQQKPGQAPQLLIYRASNLESGIPARFSGSGSRTDFTLTI |
| | | | SRLEPEDFAVYYCQQSFDDPFTFGQGTKLEIK |
| SEQ ID NO: | VL | E-H.4 | EIVLTQSPATLSLSPGERATLSCRASESVDSSGNSFMHW |
| 3096 | | | YQQKPGQAPQLLIYRASNLESGIPARFSGSGSRTDFTLTI |
| | | | SSLQPEDFAVYYCQQSFDDPFTFGQGTKLEIK |
| SEQ ID NO: | VL | E-H.5 | DIQLTQSPSSLSASVGDRVTITCRASESVDSSGNSFMHW |
| 3097 | | | YQQKPGQAPQLLIYRASNLESGVPSRFSGSGSRTDFTLT |
| | | | ISSLQPEDVATYYCQQSFDDPFTFGQGTKLEIK |
| SEQ ID NO: | VL | E-H.6 | EIVLTQSPATLSLSPGERATLSCRASESVDSSGNSFMHW |
| 3098 | | | YQQKPGQAPQLLIYRASNLESGIPARFSGSGPRTDFTLTI |
| | | | SSLEPEDFAVYYCQQSFDDPFTFGQGTKLEIK |
| SEQ ID NO: | VL | E-H.7 | EIVLTQSPATLSLSPGERATLSCRASESVDSSGNSFMHW |
| 3099 | | | YQQKPGQAPQLLIYRASNLESGIPDRFSGSGSRTDFTLTI |
| | | | SRLEPEDFAVYYCQQSFDDPFTFGQGTKLEIK |
| SEQ ID NO: | VL | E-H.8 | DIQLTQSPSSLSASVGDRVTITCRASESVDSSGNSFMHW |
| 3100 | | | YQQKPGKVPQLLIYRASNLESGVPSRFSGSGSRTDFTLT |
| | | | ISSLQPEDVATYYCQQSFDDPFTFGQGTKLEIK |
| SEQ ID NO: | VL | E-H.9 | DIQLTQSPSSLSASVGDRVTITCRASESVDSSGNSFMHW |
| 3101 | | | YQQKPGKTPQLLIYRASNLESGIPSRFSGSGSRTDFTLTI |
| | | | RSLQPEDFATYYCQQSFDDPFTFGQGTKLEIK |
| SEQ ID NO: | VL | E-H.10 | EIVLTQSPGTLSLSPGERATLSCRASESVDSSGNSFMHW |
| 3102 | | | YQQKPGQAPQLLIYRASNLESGIPDRFSGSGSRTDFTLTI |
| | | | SRLEPEDFAVYYCQQSFDDPFTFGQGTKLEIK |
| SEQ ID NO: | VL | E-H.11 | EIVLTQSPATLSLSPGERATLSCRASESVDSSGNSFMHW |
| 3103 | | | YQQKPGLAPQLLIYRASNLESGIPDRFSGSGSRTDFTLTI |
| | | | SRLEPEDFAVYYCQQSFDDPFTFGQGTKLEIK |
| SEQ ID NO: | VL | E-H.12 | DIQLTQSPSSLSASVGDRVTITCRASESVDSSGNSFMHW |
| 3104 | | | YQQKPGKAPQLLIYRASNLESGVPSRFSGSGSRTDFTLT |
| | | | ISSLQPEDFATYYCQQSFDDPFTFGQGTKLEIK |
| SEQ ID NO: | VL | E-H.13 | DIQLTQSPSSVSASVGDRVTITCRASESVDSSGNSFMHW |
| 3105 | | | YQQKPGKAPQLLIYRASNLESGVPSRFSGSGSRTDFTLT |
| | | | ISSLQPEDFATYYCQQSFDDPFTFGQGTKLEIK |
| SEQ ID NO: | VL | E-H.14 | AIQLTQSPSSLSASVGDRVTITCRASESVDSSGNSFMHW |
| 3106 | | | YQQKPGKAPQLLIYRASNLESGVPSRFSGSGSRTDFTLT |
| | | | ISSLQPEDFATYYCQQSFDDPFTFGQGTKLEIK |
| SEQ ID NO: | VL | E-H.15 | DIQLTQSPSFLSASVGDRVTITCRASESVDSSGNSFMHW |
| 3107 | | | YQQKPGKAPQLLIYRASNLESGVPSRFSGSGSRTEFTLTI |
| | | | SSLQPEDFATYYCQQSFDDPFTFGQGTKLEIK |
| SEQ ID NO: | VL | E-H.16 | DIQLTQSPSSLSASVGDRVTITCRASESVDSSGNSFMHW |
| 3108 | | | YQQKPGKAPQLLIYRASNLESGVPSRFSGSGSRTDFTFTI |
| | | | SSLQPEDIATYYCQQSFDDPFTFGQGTKLEIK |
| SEQ ID NO: | VL | E-H.17 | EIVLTQSPATLSVSPGERATLSCRASESVDSSGNSFMHW |
| 3109 | | | YQQKPGQAPQLLIYRASNLESGIPARFSGSGSRTEFTLTI |
| | | | SILQSEDFAVYYCQQSFDDPFTFGQGTKLEIK |
| SEQ ID NO: | VL | E-H.18 | EIVLTQSPATLSVSPGERATLSCRASESVDSSGNSFMHW |
| 3110 | | | YQQKPGQAPQLLIYRASNLESGIPARFSGSGSRTEFTLTI |
| | | | SSLQSEDFAVYYCQQSFDDPFTFGQGTKLEIK |
| SEQ ID NO: | VL | E-H.19 | AIRLTQSPFSLSASVGDRVTITCRASESVDSSGNSFMHW |
| 3111 | | | YQQKPAKAPQLFIYRASNLESGVPSRFSGSGSRTDFTLTI |
| | | | SSLQPEDFATYYCQQSFDDPFTFGQGTKLEIK |
| SEQ ID NO: | VL | E-H.20 | DIQLTQSPSSLSASVGDRVTITCRASESVDSSGNSFMHW |
| 3112 | | | YQQKPGKAPQSLIYRASNLESGVPSRFSGSGSRTDFTLTI |
| | | | SSLQPEDFATYYCQQSFDDPFTFGQGTKLEIK |
| SEQ ID NO: | VL | E-H.21 | DIQLTQSPSSLSASVGDRVTITCRASESVDSSGNSFMHW |
| 3113 | | | YQQKPGKAPQRLIYRASNLESGVPSRFSGSGSRTEFTLTI |
| | | | SNLQPEDFATYYCQQSFDDPFTFGQGTKLEIK |
| SEQ ID NO: | VL | E-H.22 | DIQLTQSPSTLSASVGDRVTITCRASESVDSSGNSFMHW |
| 3114 | | | YQQKPGKAPQLLIYRASNLESGVPSRFSGSGSRTEFTLTI |
| | | | SSLQPDDFATYYCQQSFDDPFTFGQGTKLEIK |
| SEQ ID NO: | VL | E-H.23 | EIVLTQSPDFQSVTPKEKVTITCRASESVDSSGNSFMHW |
| 3115 | | | YQQKPDQSPQLLIYRASNLESGVPSRFSGSGSRTDFTLTI |
| | | | NSLEAEDAATYYCQQSFDDPFTFGQGTKLEIK |
| SEQ ID NO: | VL | E-H.24 | DIQLTQSPSSLSASVGDRVTITCRASESVDSSGNSFMHW |
| 3116 | | | YQQKPGKAPQSLIYRASNLESGVPSKFSGSGSRTDFTLT |
| | | | ISSLQPEDFATYYCQQSFDDPFTFGQGTKLEIK |
| SEQ ID NO: | VL | E-H.25 | DIQLTQSPSSLSASVGDRVTITCRASESVDSSGNSFMHW |
| 3117 | | | YQQKPGKAPQRLIYRASNLESGVPSRFSGSGSRTEFTLTI |
| | | | SSLQPEDFATYYCQQSFDDPFTFGQGTKLEIK |
| SEQ ID NO: | VL | E-H.26 | DIVLTQTPLSLSVTPGQPASISCRASESVDSSGNSFMHW |
| 3118 | | | YLQKPGQPPQLLIYRASNLESGVPDRFSGSGSRTDFTLK |
| | | | ISRVEAEDVGVYYCQQSFDDPFTFGQGTKLEIK |
| SEQ ID NO: | VL | E-H.27 | DIQLTQSPSSLSASVGDRVTITCRASESVDSSGNSFMHW |
| 3119 | | | YQQKPEKAPQSLIYRASNLESGVPSRFSGSGSRTDFTLTI |
| | | | SSLQPEDFATYYCQQSFDDPFTFGQGTKLEIK |
| SEQ ID NO: | VL | E-H.28 | EIVLTQSPPTLSLSPGERVTLSCRASESVDSSGNSFMHW |
| 3120 | | | YQQKPGQAPQLLIYRASNLESGIPARFSGSGSRTDFTLTI |
| | | | SSLQPEDFAVYYCQQSFDDPFTFGQGTKLEIK |
| SEQ ID NO: | VL | E-H.29 | DIQLTQSPSAMSASVGDRVTITCRASESVDSSGNSFMH |
| 3121 | | | WYQQKPGKVPQRLIYRASNLESGVPSRFSGSGSRTEFTL |
| | | | TISSLQPEDFATYYCQQSFDDPFTFGQGTKLEIK |
| SEQ ID NO: 3122 | VL | E-H.30 | DIVLTQSPLSLPVTPGEPASISCRASESVDSSGNSFMHW |
| | | | YLQKPGQSPQLLIYRASNLESGVPDRFSGSGSRTDFTLK |
| | | | ISRVEAEDVGVYYCQQSFDDPFTFGQGTKLEIK |
| SEQ ID NO: | VL | E-H.31 | DIVLTQTPLSLPVTPGEPASISCRASESVDSSGNSFMHW |
| 3123 | | | YLQKPGQSPQLLIYRASNLESGVPDRFSGSGSRTDFTLK |
| | | | ISRVEAEDVGVYYCQQSFDDPFTFGQGTKLEIK |
| SEQ ID NO: | VL | E-H.32 | DIVLTQTPLSLSVTPGQPASISCRASESVDSSGNSFMHW |
| 3124 | | | YLQKPGQSPQLLIYRASNLESGVPDRFSGSGSRTDFTLK |
| | | | ISRVEAEDVGVYYCQQSFDDPFTFGQGTKLEIK |
| SEQ ID NO: | VL | E-H.33 | EIVLTQSPPTLSLSPGERVTLSCRASESVDSSGNSFMHW |
| 3125 | | | YQQKPGQAPQLLIYRASNLESSIPARFSGSGSRTDFTLTI |
| | | | SSLQPEDFAVYYCQQSFDDPFTFGQGTKLEIK |
| SEQ ID NO: | VL | E-H.34 | DIVLTQSPLSLPVTLGQPASISCRASESVDSSGNSFMHW |
| 3126 | | | YQQRPGQSPQRLIYRASNLESGVPDRFSGSGSRTDFTLK |
| | | | ISRVEAEDVGVYYCQQSFDDPFTFGQGTKLEIK |
| SEQ ID NO: | VL | E-H.35 | DIVLTQTPLSSPVTLGQPASISCRASESVDSSGNSFMHW |
| 3127 | | | YQQRPGQPPQLLIYRASNLESGVPDRFSGSGARTDFTLK |
| | | | ISRVEAEDVGVYYCQQSFDDPFTFGQGTKLEIK |
| SEQ ID NO: | VL | E-H.36 | DIVLTQSPAFLSVTPGEKVTITCRASESVDSSGNSFMHW |
| 3128 | | | YQQKPDQAPQLLIYRASNLESGVPSRFSGSGSRTDFTFTI |
| | | | SSLEAEDAATYYCQQSFDDPFTFGQGTKLEIK |
| SEQ ID NO: | VL | E-H.37 | DIQLIQSPSFLSASVGDRVSIICRASESVDSSGNSFMHWY |
| 3129 | | | LQKPGKSPQLFIYRASNLESGVSSRFSGRGSRTDFTLTIIS |
| | | | LKPEDFAAYYCQQSFDDPFTFGQGTKLEIK |
| SEQ ID NO: | VL | E-H.38 | EIVLTQTPLSLSITPGEQASISCRASESVDSSGNSFMHWY |
| 3130 | | | LQKARPVPQLLIYRASNLESGVPDRFSGSGSRTDFTLKIS |
| | | | RVEAEDFGVYYCQQSFDDPFTFGQGTKLEIK |
| SEQ ID NO: | VL | E-H.39 | EIVLTQTPLSLSITPGEQASMSCRASESVDSSGNSFMHW |
| 3131 | | | YLQKARPVPQLLIYRASNLESGVPDRFSGSGSRTDFTLK |
| | | | ISRVEAEDFGVYYCQQSFDDPFTFGQGTKLEIK |
| SEQ ID NO: | VL | E-H.40 | EITLTQSPAFMSATPGDKVNISCRASESVDSSGNSFMHW |
| 3132 | | | YQQKPGEAPQFIIYRASNLESGIPPRFSGSGYRTDFTLTI |
| | | | NNIESEDAAYYYCQQSFDDPFTFGQGTKLEIK |

Variable HEAVY chain (VH)

| | | | |
|---|---|---|---|
| SEQ ID NO: | VH | E-H.1 | QVQLVQSGAEVKKPGASVKVSCKASGYAFSSSWMNW |
| 3133 | | | VRQAPGQGLEWIGRIYPGDGDTKYNGKFKGRATLTAD |
| | | | KSTSTAYMELSSLRSEDTAVYYCARRGTGGWYFDVW |
| | | | GQGTTVTVSS |
| SEQ ID NO: | VH | E-H.2 | QVQLVQSGAEVKKPGSSVKVSCKASGYAFSSSWMNW |
| 3134 | | | VRQAPGQGLEWIGRIYPGDGDTKYNGKFKGRATLTAD |
| | | | KSTSTAYMELSSLRSEDTAVYYCARRGTGGWYFDVW |
| | | | GQGTTVTVSS |
| SEQ ID NO: | VH | E-H.3 | QVQLVQSGAEVKKPGASVKVSCKASGYAFSSSWMNW |
| 3135 | | | VRQAPGKGLEWIGRIYPGDGDTKYNGKFKGRATLTAD |
| | | | KSTSTAYMELSSLRSEDTAVYYCARRGTGGWYFDVW |
| | | | GQGTTVTVSS |
| SEQ ID NO: | VH | E-H.4 | QVQLVQSGAEVKKPGASVKVSCKASGYAFSSSWMNW |
| 3136 | | | VRQAPGQELEWIGRIYPGDGDTKYNGKFKGRATLTAD |
| | | | KSISTAYMELSSLRSEDTATYYCARRGTGGWYFDVWG |
| | | | QGTTVTVSS |
| SEQ ID NO: | VH | E-H.5 | EVQLVQSGAEVKKPGATVKISCKASGYAFSSSWMNWV |
| 3137 | | | QQAPGKGLEWIGRIYPGDGDTKYNGKFKGRATLTADK |
| | | | STSTAYMELSSLRSEDTAVYYCARRGTGGWYFDVWG |
| | | | QGTTVTVSS |
| SEQ ID NO: | VH | E-H.6 | QVQLVQSGAEVKKTGSSVKVSCKASGYAFSSSWMNW |
| 3138 | | | VRQAPGQALEWIGRIYPGDGDTKYNGKFKGRATLTAD |
| | | | KSMSTAYMELSSLRSEDTAMYYCARRGTGGWYFDVW |
| | | | GQGTTVTVSS |
| SEQ ID NO: | VH | E-H.7 | QVQLVQSGAEVKKPGASVKVSCKASGYAFSSSWMNW |
| 3139 | | | VRQAPGQRLEWIGRIYPGDGDTKYNGKFKGRATLTAD |
| | | | KSASTAYMELSSLRSEDMAVYYCARRGTGGWYFDVW |
| | | | GQGTTVTVSS |
| SEQ ID NO: | VH | E-H.8 | QVQLVQSGAEVKKPGASVKVSCKASGYAFSSSWMNW |
| 3140 | | | VRQAPGQGLEWIGRIYPGDGDTKYNGKFKGRATLTAD |
| | | | KSTSTAYMELRSLRSDDMAVYYCARRGTGGWYFDVW |
| | | | GQGTTVTVSS |
| SEQ ID NO: | VH | E-H.9 | QVQLVQSGAEVKKPGASVKVSCKASGYAFSSSWMNW |
| 3141 | | | VRQAPGQRLEWIGRIYPGDGDTKYNGKFKGRATLTAD |
| | | | KSASTAYMELSSLRSEDTAVYYCARRGTGGWYFDVW |
| | | | GQGTTVTVSS |
| SEQ ID NO: | VH | E-H.10 | QVQLVQSGAEVKKPGASVKVSCKASGYAFSSSWMNW |
| 3142 | | | VRQAPGQGLEWIGRIYPGDGDTKYNGKFKGRATLTAD |
| | | | KSTSTAYMELRSLRSDDTAVYYCARRGTGGWYFDVW |
| | | | GQGTTVTVSS |
| SEQ ID NO: | VH | E-H.11 | QVQLVQSGAEVKKPGASVKVSCKASGYAFSSSWMNW |
| 3143 | | | VRQAPGQGLEWIGRIYPGDGDTKYNGKFKGRATLTAD |
| | | | KSISTAYMELSRLRSDDTAVYYCARRGTGGWYFDVWG |
| | | | QGTTVTVSS |
| SEQ ID NO: | VH | E-H.12 | QVQLVQSGAEVKKPGASVKVSCKASGYAFSSSWMNW |
| 3144 | | | VRQAPGQGLEWIGRIYPGDGDTKYNGKFKGRATLTAD |
| | | | KSISTAYMELSRLRSDDTVVYYCARRGTGGWYFDVWG |
| | | | QGTTVTVSS |
| SEQ ID NO: | VH | E-H.13 | QVQLVQSGAEVKKPGASVKVSCKASGYAFSSSWMNW |
| 3145 | | | VRQAPGQGLEWIGRIYPGDGDTKYNGKFKGWATLTAD |
| | | | KSISTAYMELSRLRSDDTAVYYCARRGTGGWYFDVWG |
| | | | QGTTVTVSS |
| SEQ ID NO: | VH | E-H.14 | QVQLVQSGAEVKKPGASVKVSCKASGYAFSSSWMNW |
| 3146 | | | VRQATGQGLEWIGRIYPGDGDTKYNGKFKGRATLTAN |
| | | | KSISTAYMELSSLRSEDTAVYYCARRGTGGWYFDVWG |
| | | | QGTTVTVSS |
| SEQ ID NO: | VH | E-H.15 | QVQLVQSGSELKKPGASVKVSCKASGYAFSSSWMNW |
| 3147 | | | VRQAPGQGLEWIGRIYPGDGDTKYNGKFKGRAVLSAD |
| | | | KSVSTAYLQISSLKAEDTAVYYCARRGTGGWYFDVWG |
| | | | QGTTVTVSS |
| SEQ ID NO: | VH | E-H.16 | QVQLVQSGPEVKKPGTSVKVSCKASGYAFSSSWMNW |
| 3148 | | | VRQARGQRLEWIGRIYPGDGDTKYNGKFKGRATLTAD |
| | | | KSTSTAYMELSSLRSEDTAVYYCARRGTGGWYFDVW |
| | | | GQGTTVTVSS |
| SEQ ID NO: | VH | E-H.17 | EVQLVQSGAEVKKPGESLKISCKASGYAFSSSWMNWV |
| 3149 | | | RQMPGKGLEWIGRIYPGDGDTKYNGKFKGQATLSADK |
| | | | SISTAYLQWSSLKASDTAMYYCARRGTGGWYFDVWG |
| | | | QGTTVTVSS |
| SEQ ID NO: | VH | E-H.18 | QVQLVQSGSELKKPGASVKVSCKASGYAFSSSWMNW |
| 3150 | | | VRQAPGQGLEWIGRIYPGDGDTKYNGKFKGRAVLSAD |
| | | | KSVSMAYLQISSLKAEDTAVYYCARRGTGGWYFDVW |
| | | | GQGTTVTVSS |
| SEQ ID NO: | VH | E-H.19 | QVQLVQSGHEVKQPGASVKVSCKASGYAFSSSWMNW |
| 3151 | | | VPQAPGQGLEWIGRIYPGDGDTKYNGKFKGRAVLSAD |
| | | | KSASTAYLQISSLKAEDMAMYYCARRGTGGWYFDVW |
| | | | GQGTTVTVSS |
| SEQ ID NO: | VH | E-H.20 | EVQLVQSGAEVKKPGESLKISCKASGYAFSSSWMNWV |
| 3152 | | | RQMPGKGLEWIGRIYPGDGDTKYNGKFKGQATLSADK |
| | | | PISTAYLQWSSLKASDTAMYYCARRGTGGWYFDVWG |
| | | | QGTTVTVSS |
| SEQ ID NO: | VH | E-H.21 | EVQLVQSGAEVKKPGESLRISCKASGYAFSSSWMNWV |
| 3153 | | | RQMPGKGLEWIGRIYPGDGDTKYNGKFKGQATLSADK |
| | | | SISTAYLQWSSLKASDTAMYYCARRGTGGWYFDVWG |
| | | | QGTTVTVSS |
| SEQ ID NO: | VH | E-H.22 | EVQLVQSGAEVKKPGESLRISCKASGYAFSSSWMNWV |
| 3154 | | | RQMPGKGLEWIGRIYPGDGDTKYNGKFKGHATLSADK |
| | | | SISTAYLQWSSLKASDTAMYYCARRGTGGWYFDVWG |
| | | | QGTTVTVSS |
| SEQ ID NO: | VH | E-H.23 | QVQLVQSGAEVKKTGSSVKVSCKASGYAFSSSWMNW |
| 3155 | | | VRQAPRQALEWIGRIYPGDGDTKYNGKFKGRATLTAD |
| | | | KSMSTAYMELSSLRSEDTAMYYCARRGTGGWYFDVW |
| | | | GQGTTVTVSS |
| SEQ ID NO: | VH | E-H.24 | EVQLVESGGGLVQPGRSLRLSCTASGYAFSSSWMNWV |
| 3156 | | | RQAPGKGLEWIGRIYPGDGDTKYNGKFKGRATLSADK |
| | | | SKSIAYLQMNSLKTEDTAVYYCARRGTGGWYFDVWG |
| | | | QGTTVTVSS |
| SEQ ID NO: | VH | E-H.25 | EVQLVESGGGLVQPGPSLRLSCTASGYAFSSSWMNWV |
| 3157 | | | RQAPGKGLEWIGRIYPGDGDTKYNGKFKGRATLSADK |
| | | | SKSIAYLQMNSLKTEDTAVYYCARRGTGGWYFDVWG |
| | | | QGTTVTVSS |
| SEQ ID NO: | VH | E-H.26 | QVQLQESGPGLVKPSQTLSLTCTASGYAFSSSWMNWV |
| 3158 | | | RQPPGKGLEWIGRIYPGDGDTKYNGKFKGRATLSADKS |
| | | | KSQASLKLSSVTAADTAVYYCARRGTGGWYFDVWGQ |
| | | | GTTVTVSS |
| SEQ ID NO: | VH | E-H.27 | QVQLQESGPGLVKPSGTLSLTCAASGYAFSSSWMNWV |
| 3159 | | | RQPPGKGLEWIGRIYPGDGDTKYNGKFKGRATLSADKS |
| | | | KSQASLKLSSVTAADTAVYYCARRGTGGWYFDVWGQ |
| | | | GTTVTVSS |
| SEQ ID NO: | VH | E-H.28 | EVQLVESGGGLVKPGRSLRLSCTASGYAFSSSWMNWV |
| 3160 | | | RQAPGKGLEWIGRIYPGDGDTKYNGKFKGRATLSADK |
| | | | SKSIAYLQMNSLKTEDTAVYYCARRGTGGWYFDVWG |
| | | | QGTTVTVSS |
| SEQ ID NO: | VH | E-H.29 | EVQLVESGGGLVQPGGSLKLSCAASGYAFSSSWMNWV |
| 3161 | | | RQASGKGLEWIGRIYPGDGDTKYNGKFKGRATLSADK |
| | | | SKSTAYLQMNSLKTEDTAVYYCARRGTGGWYFDVWG |
| | | | QGTTVTVSS |
| SEQ ID NO: | VH | E-H.30 | QVQLQESGPGLVKPSQTLSLTCAASGYAFSSSWMNWV |
| 3162 | | | RQPPGKGLEWIGRIYPGDGDTKYNGKFKGRATLSADKS |
| | | | KSQASLKLSSVTAADTAVYYCARRGTGGWYFDVWGQ |
| | | | GTTVTVSS |
| SEQ ID NO: | VH | E-H.31 | EVQLVESGGGLVKPGGSLRLSCAASGYAFSSSWMNWV |
| 3163 | | | RQAPGKGLEWIGRIYPGDGDTKYNGKFKGRATLSADK |
| | | | SKSTAYLQMNSLKTEDTAVYYCARRGTGGWYFDVWG |
| | | | QGTTVTVSS |
| SEQ ID NO: | VH | E-H.32 | EVQLVESGGALVKPGGSLRLSCAASGYAFSSSWMNWV |
| 3164 | | | RQAPGKGLEWIGRIYPGDGDTKYNGKFKGRATLSADK |
| | | | SKSTAYLQMNSLKTEDTAVYYCARRGTGGWYFDVWG |
| | | | QGTTVTVSS |
| SEQ ID NO: | VH | E-H.33 | QVQLQESGPGLVKPSQTLSLTCAAYGYAFSSSWMNWV |
| 3165 | | | RQPPGKGLEWIGRIYPGDGDTKYNGKFKGRATLSADKS |
| | | | KSQASLKLSSVTAADTAVYYCARRGTGGWYFDVWGQ |
| | | | GTTVTVSS |
| SEQ ID NO: | VH | E-H.34 | QVQLQESGSGLVKPSQTLSLTCAASGYAFSSSWMNWV |
| 3166 | | | RQPPGKGLEWIGRIYPGDGDTKYNGKFKGRATLSADKS |
| | | | KSQASLKLSSVTAADTAVYYCARRGTGGWYFDVWGQ |
| | | | GTTVTVSS |
| SEQ ID NO: | VH | E-H.35 | EVQLVESGGGLVQPGGSLRLSCAASGYAFSSSWMNWV |
| 3167 | | | RQAPGKGLEWIGRIYPGDGDTKYNGKFKGRATLSADK |
| | | | SKSSAYLQMNSLKTEDTAVYYCARRGTGGWYFDVWG |
| | | | QGTTVTVSS |
| SEQ ID NO: | VH | E-H.36 | QVQLQESGPGLVKPSDTLSLTCTASGYAFSSSWMNWV |
| 3168 | | | RQPPGKGLEWIGRIYPGDGDTKYNGKFKGRATLSADKS |
| | | | KSQASLKLSSVTAADTAVYYCARRGTGGWYFDVWGQ |
| | | | GTTVTVSS |
| SEQ ID NO: | VH | E-H.37 | QVQLQESGPGLVKPSQTLSLTCTASGYAFSSSWMNWV |
| 3169 | | | RQHPGKGLEWIGRIYPGDGDTKYNGKFKGRATLSADK |
| | | | SKSQASLKLSSVTAADTAVYYCARRGTGGWYFDVWG |
| | | | QGTTVTVSS |
| SEQ ID NO: | VH | E-H.38 | QVQLQESGPGLVKPSQTLSLTCTASGYAFSSSWMNWV |
| 3170 | | | RQHPGKGLEWIGRIYPGDGDTKYNGKFKGLATLSADK |
| | | | SKSQASLKLSSVTAADTAVYYCARRGTGGWYFDVWG |
| | | | QGTTVTVSS |
| SEQ ID NO: | VH | E-H.39 | QVQLVESGGGVVQPGRSLRLSCAASGYAFSSSWMNW |
| 3171 | | | VRQAPGKGLEWIGRIYPGDGDTKYNGKFKGRATLSAD |
| | | | KSKSTAYLQMSSLRAEDTAVYYCARRGTGGWYFDVW |
| | | | GQGTTVTVSS |
| SEQ ID NO: | VH | E-H.40 | QVQLVESGGGLVKPGGSLRLSCAASGYAFSSSWMNWV |
| 3172 | | | RQAPGKGLEWIGRIYPGDGDTKYNGKFKGRATLSADK |
| | | | AKSSAYLQMNSLRAEDTAVYYCARRGTGGWYFDVWG |
| | | | QGTTVTVSS |
| SEQ ID NO: | VH | E-H.41 | QVQLVESGGGLVQPGGSLRLSCSASGYAFSSSWMNWV |
| 3173 | | | RQAPGKGLEWIGRIYPGDGDTKYNGKFKGRATLSADK |
| | | | SKSTAYLQMNSLRAEDTAVYYCARRGTGGWYFDVWG |
| | | | QGTTVTVSS |
| SEQ ID NO: | VH | E-H.42 | QVQLLESGGGLVKPGGSLRLSCAASGYAFSSSWMNWV |
| 3174 | | | RQAPGKGLEWIGRIYPGDGDTKYNGKFKGRATLSADK |
| | | | AKSSAYLQMNSLRAEDTAVYYCARRGTGGWYFDVWG |
| | | | QGTTVTVSS |
| SEQ ID NO: | VH | E-H.43 | EVQLVESGGGLVQPGGSLRLSCSASGYAFSSSWMNWV |
| 3175 | | | RQAPGKGLEWIGRIYPGDGDTKYNGKFKGRATLSADK |
| | | | SKSTAYLQMSSLRAEDTAVYYCARRGTGGWYFDVWG |
| | | | QGTTVTVSS |
| SEQ ID NO: | VH | E-H.44 | QVQLQESGPGLVKPSDTLSLTCAASGYAFSSSWMNWV |
| 3176 | | | RQPPGKGLEWIGRIYPGDGDTKYNGKFKGRATLSADKS |
| | | | KSQASLKLSSVTAVDTAVYYCARRGTGGWYFDVWGQ |
| | | | GTTVTVSS |
| SEQ ID NO: | VH | E-H.45 | QVQLQESGPGLVKPSQTLSLTCAASGYAFSSSWMNWV |
| 3177 | | | RQPPGKGLEWIGRIYPGDGDTKYNGKFKGRATLSADKS |
| | | | KSQASLKLSSVTAVDTAVYYCARRGTGGWYFDVWGQ |
| | | | GTTVTVSS |
| SEQ ID NO: | VH | E-H.46 | EVQLVESGGGLVQPGGSLRLSCSASGYAFSSSWMNWV |
| 3178 | | | RQAPGKGLEWIGRIYPGDGDTKYNGKFKGRATLSADK |
| | | | SKSTAYVQMSSLRAEDTAVYYCARRGTGGWYFDVWG |
| | | | QGTTVTVSS |
| SEQ ID NO: | VH | E-H.47 | QVQLVDSGGGVVQPGRSLRLSCAASGYAFSSSWMNW |
| 3179 | | | VRQAPGKGLEWIGRIYPGDGDTKYNGKFKGRATLSAD |
| | | | KSKSTAYLQMNSLRAEDTAVYYCARRGTGGWYFDVW |
| | | | GQGTTVTVSS |
| SEQ ID NO: | VH | E-H.48 | QVQLVESGGGVVQPGRSLRLSCAASGYAFSSSWMNW |
| 3180 | | | VRQAPGKGLEWIGRIYPGDGDTKYNGKFKGRATLSAD |
| | | | KSKSTAYLQMNSLRAEGTAVYYCARRGTGGWYFDVW |
| | | | GQGTTVTVSS |
| SEQ ID NO: | VH | E-H.49 | QVQLVESGGGVVQPGRSLRLSCAASGYAFSSSWMNW |
| 3181 | | | VRQAPGKGLEWIGRIYPGDGDTKYNGKFKGRATLSAD |
| | | | KSKSTAYLQMNSLRAEDTAVYYCARRGTGGWYFDVW |
| | | | GQGTTVTVSS |
| SEQ ID NO: | VH | E-H.50 | EVQLVESGGGLVQPGGSLRLSCAASGYAFSSSWMNWV |
| 3182 | | | RQAPGKGLEWIGRIYPGDGDTKYNGKFKGRATLSADK |
| | | | SKSTAYLQMNSLRAEDTAVYYCARRGTGGWYFDVWG |
| | | | QGTTVTVSS |

TABLE 12
Amino acid sequences for anti TCRβ V10 antibodies. Amino acid and nucleotide
sequences for murine and humanized antibody molecules which bind to TCRBV 10 (e.g., TCRBV
10-1, TCRBV 10-2 or TCRBV 10-3). The amino acid the heavy and light chain CDRs, and the
amino acid and nucleotide sequences of the heavy and light chain variable regions, and the
heavy and light chains are shown.
Murine antibody D, also referred to as S511 antibody

| | | |
|---|---|---|
| SEQ ID NO: 1288 | HC CDR1 (Kabat) | SYGMS |
| SEQ ID NO: 1289 | HC CDR2 (Kabat) | LISSGGSYTYYTDSVKG |
| SEQ ID NO: 1290 | HC CDR3 (Kabat) | HGGNFFDY |
| SEQ ID NO: 1291 | HC CDR1 (Chothia) | GFTFRSY |
| SEQ ID NO: 1292 | HC CDR2 (Chothia) | SSGGSY |
| SEQ ID NO: 1290 | HC CDR3 (Chothia) | HGGNFFDY |
| SEQ ID NO: 1293 | HC CDR1 (Combined) | GFTFRSYGMS |
| SEQ ID NO: 1289 | HC CDR2 (Combined)) | LISSGGSYTYYTDSVKG |
| SEQ ID NO: 1290 | HC CDR3(Combined) | HGGNFFDY |
| SEQ ID NO: 1294 | LC CDR1 (Kabat) | SVSSSVSYMH |
| SEQ ID NO: 1295 | LC CDR2 (Kabat) | DTSKLAS |
| SEQ ID NO: 1296 | LC CDR3 (Kabat) | QQWSSNPQYT |
| SEQ ID NO: 1297 | LC CDR1 (Chothia) | SSSVSY |
| SEQ ID NO: 1295 | LC CDR2 (Chothia) | DTSKLAS |
| SEQ ID NO: 1296 | LC CDR3 (Chothia) | QQWSSNPQYT |
| SEQ ID NO: 1294 | LC CDR1 (Combined) | SVSSSVSYMH |
| SEQ ID NO: 1295 | LC CDR2 (Combined) | DTSKLAS |
| SEQ ID NO: 1296 | LC CDR3 (Combined) | QQWSSNPQYT |
| SEQ ID NO: 3183 | VH | EVQLVESGGDLVKPGGSLKLSCAVSGFTFR |
| | | SYGMSWVRQTPDKRLEWVALISSGGSYTY |
| | | YTDSVKGRFTISRDNAKNTLYLQMSSLKSE |
| | | DTAIYYCSRHGGNFFDYWGQGTTLTVSS |
| SEQ ID NO: 3184 | VL | QIVLTQSPSIMSASPGEKVTMTCSVSSSVSY |
| | | MHWYQQKSGTSPKRWIYDTSKLASGVPAR |
| | | FSGSGSGTSYSLTISSMEAEDAATYYCQQW |
| | | SSNPQYTFGGGTKLEIK |

Humanized antibody D (D-H antibody)
Variable light chain (VL)

| | | | |
|---|---|---|---|
| SEQ ID NO: 3185 | VL | D-H.1 | DIVLTQSPAFLSVTPGEKVTITCSVSSSVSYM |
| | | | HWYQQKPDQAPKLLIYDTSKLASGVPSRFS |
| | | | GSGSGTDYTFTISSLEAEDAATYYCQQWSSN |
| | | | PQYTFGQGTKLEIK |
| SEQ ID NO: 3186 | VL | D-H.2 | AIQLTQSPSSLSASVGDRVTITCSVSSSVSYM |
| | | | HWYQQKPGKAPKLLIYDTSKLASGVPSRFS |
| | | | GSGSGTDYTLTISSLQPEDFATYYCQQWSSN |
| | | | PQYTFGQGTKLEIK |
| SEQ ID NO: 3187 | VL | D-H.3 | DIQLTQSPSFLSASVGDRVTITCSVSSSVSYM |
| | | | HWYQQKPGKAPKLLIYDTSKLASGVPSRFS |
| | | | GSGSGTEYTLTISSLQPEDFATYYCQQWSSN |
| | | | PQYTFGQGTKLEIK |
| SEQ ID NO: 3188 | VL | D-H.4 | DIQLTQSPSSLSASVGDRVTITCSVSSSVSYM |
| | | | HWYQQKPGKAPKLLIYDTSKLASGVPSRFS |
| | | | GSGSGTDYTLTISSLQPEDFATYYCQQWSSN |
| | | | PQYTFGQGTKLEIK |
| SEQ ID NO: 3189 | VL | D-H.5 | DIQLTQSPSSVSASVGDRVTITCSVSSSVSYM |
| | | | HWYQQKPGKAPKLLIYDTSKLASGVPSRFS |
| | | | GSGSGTDYTLTISSLQPEDFATYYCQQWSSN |
| | | | PQYTFGQGTKLEIK |
| SEQ ID NO: 3190 | VL | D-H.6 | DIQLTQSPSSLSASVGDRVTITCSVSSSVSYM |
| | | | HWYQQKPGKVPKLLIYDTSKLASGVPSRFS |
| | | | GSGSGTDYTLTISSLQPEDVATYYCQQWSSN |
| | | | PQYTFGQGTKLEIK |
| SEQ ID NO: 3191 | VL | D-H.7 | DIQLTQSPSSLSASVGDRVTITCSVSSSVSYM |
| | | | HWYQQKPGQAPKLLIYDTSKLASGVPSRFS |
| | | | GSGSGTDYTLTISSLQPEDVATYYCQQWSSN |
| | | | PQYTFGQGTKLEIK |
| SEQ ID NO: 3192 | VL | D-H.8 | EIVLTQSPDFQSVTPKEKVTITCSVSSSVSYM |
| | | | HWYQQKPDQSPKLLIYDTSKLASGVPSRFSG |
| | | | SGSGTDYTLTINSLEAEDAATYYCQQWSSNP |
| | | | QYTFGQGTKLEIK |
| SEQ ID NO: 3193 | VL | D-H.9 | AIRLTQSPFSLSASVGDRVTITCSVSSSVSYM |
| | | | HWYQQKPAKAPKLFIYDTSKLASGVPSRFSG |
| | | | SGSGTDYTLTISSLQPEDFATYYCQQWSSNP |
| | | | QYTFGQGTKLEIK |
| SEQ ID NO: 3194 | VL | D-H.10 | DIQLTQSPSSLSASVGDRVTITCSVSSSVSYM |
| | | | HWYQQKPGKAPKLLIYDTSKLASGVPSRFS |
| | | | GSGSGTDYTFTISSLQPEDIATYYCQQWSSNP |
| | | | QYTFGQGTKLEIK |
| SEQ ID NO: 3195 | VL | D-H.11 | EIVLTQSPATLSLSPGERATLSCSVSSSVSYM |
| | | | HWYQQKPGQAPKLLIYDTSKLASGIPARFSG |
| | | | SGSGTDYTLTISSLEPEDFAVYYCQQWSSNP |
| | | | QYTFGQGTKLEIK |
| SEQ ID NO: 3196 | VL | D-H.12 | DIQLTQSPSTLSASVGDRVTITCSVSSSVSYM |
| | | | HWYQQKPGKAPKLLIYDTSKLASGVPSRFS |
| | | | GSGSGTEYTLTISSLQPDDFATYYCQQWSSN |
| | | | PQYTFGQGTKLEIK |
| SEQ ID NO: 3197 | VL | D-H.13 | DIQLTQSPSSLSASVGDRVTITCSVSSSVSYM |
| | | | HWYQQKPGKTPKLLIYDTSKLASGIPSRFSG |
| | | | SGSGTDYTLTIRSLQPEDFATYYCQQWSSNP |
| | | | QYTFGQGTKLEIK |
| SEQ ID NO: 3198 | VL | D-H.14 | EIVLTQSPPTLSLSPGERVTLSCSVSSSVSYM |
| | | | HWYQQKPGQAPKLLIYDTSKLASGIPARFSG |
| | | | SGSGTDYTLTISSLQPEDFAVYYCQQWSSNP |
| | | | QYTFGQGTKLEIK |
| SEQ ID NO: 3199 | VL | D-H.15 | DIQLTQSPSSLSASVGDRVTITCSVSSSVSYM |
| | | | HWYQQKPGKAPKRLIYDTSKLASGVPSRFS |
| | | | GSGSGTEYTLTISSLQPEDFATYYCQQWSSN |
| | | | PQYTFGQGTKLEIK |
| SEQ ID NO: 3200 | VL | D-H.16 | EIVLTQSPATLSLSPGERATLSCSVSSSVSYM |
| | | | HWYQQKPGQAPKLLIYDTSKLASGIPARFSG |
| | | | SGPGTDYTLTISSLEPEDFAVYYCQQWSSNP |
| | | | QYTFGQGTKLEIK |
| SEQ ID NO: 3201 | VL | D-H.17 | EIVLTQSPATLSLSPGERATLSCSVSSSVSYM |
| | | | HWYQQKPGQAPKLLIYDTSKLASGIPARFSG |
| | | | SGSGTDYTLTISRLEPEDFAVYYCQQWSSNP |
| | | | QYTFGQGTKLEIK |
| SEQ ID NO: 3202 | VL | D-H.18 | EIVLTQSPATLSLSPGERATLSCSVSSSVSYM |
| | | | HWYQQKPGQAPKLLIYDTSKLASGIPARFSG |
| | | | SGSGTDYTLTISSLQPEDFAVYYCQQWSSNP |
| | | | QYTFGQGTKLEIK |
| SEQ ID NO: 3203 | VL | D-H.19 | EIVLTQSPATLSVSPGERATLSCSVSSSVSYM |
| | | | HWYQQKPGQAPKLLIYDTSKLASGIPARFSG |
| | | | SGSGTEYTLTISSLQSEDFAVYYCQQWSSNP |
| | | | QYTFGQGTKLEIK |
| SEQ ID NO: 3204 | VL | D-H.20 | EIVLTQSPATLSVSPGERATLSCSVSSSVSYM |
| | | | HWYQQKPGQAPKLLIYDTSKLASGIPARFSG |
| | | | SGSGTEYTLTISILQSEDFAVYYCQQWSSNP |
| | | | QYTFGQGTKLEIK |
| SEQ ID NO: 3205 | VL | D-H.21 | EIVLTQSPPTLSLSPGERVTLSCSVSSSVSYM |
| | | | HWYQQKPGQAPKLLIYDTSKLASSIPARFSG |
| | | | SGSGTDYTLTISSLQPEDFAVYYCQQWSSNP |
| | | | QYTFGQGTKLEIK |
| SEQ ID NO: 3206 | VL | D-H.22 | DIQLTQSPSSLSASVGDRVTITCSVSSSVSYM |
| | | | HWYQQKPGKAPKSLIYDTSKLASGVPSRFSG |
| | | | SGSGTDYTLTISSLQPEDFATYYCQQWSSNP |
| | | | QYTFGQGTKLEIK |
| SEQ ID NO: 3207 | VL | D-H.23 | DIQLTQSPSSLSASVGDRVTITCSVSSSVSYM |
| | | | HWYQQKPGKAPKRLIYDTSKLASGVPSRFS |
| | | | GSGSGTEYTLTISNLQPEDFATYYCQQWSSN |
| | | | PQYTFGQGTKLEIK |
| SEQ ID NO: 3208 | VL | D-H.24 | DIQLTQSPSAMSASVGDRVTITCSVSSSVSY |
| | | | MHWYQQKPGKVPKRLIYDTSKLASGVPSRF |
| | | | SGSGSGTEYTLTISSLQPEDFATYYCQQWSS |
| | | | NPQYTFGQGTKLEIK |
| SEQ ID NO: 3209 | VL | D-H.25 | EIVLTQSPATLSLSPGERATLSCSVSSSVSYM |
| | | | HWYQQKPGQAPKLLIYDTSKLASGIPDRFSG |
| | | | SGSGTDYTLTISRLEPEDFAVYYCQQWSSNP |
| | | | QYTFGQGTKLEIK |
| SEQ ID NO: 3210 | VL | D-H.26 | EIVLTQSPATLSLSPGERATLSCSVSSSVSYM |
| | | | HWYQQKPGLAPKLLIYDTSKLASGIPDRFSG |
| | | | SGSGTDYTLTISRLEPEDFAVYYCQQWSSNP |
| | | | QYTFGQGTKLEIK |
| SEQ ID NO: 3211 | VL | D-H.27 | EIVLTQSPGTLSLSPGERATLSCSVSSSVSYM |
| | | | HWYQQKPGQAPKLLIYDTSKLASGIPDRFSG |
| | | | SGSGTDYTLTISRLEPEDFAVYYCQQWSSNP |
| | | | QYTFGQGTKLEIK |
| SEQ ID NO: 3212 | VL | D-H.28 | DIQLTQSPSSLSASVGDRVTITCSVSSSVSYM |
| | | | HWYQQKPGKAPKSLIYDTSKLASGVPSKFS |
| | | | GSGSGTDYTLTISSLQPEDFATYYCQQWSSN |
| | | | PQYTFGQGTKLEIK |
| SEQ ID NO: 3213 | VL | D-H.29 | DIQLTQSPSSLSASVGDRVTITCSVSSSVSYM |
| | | | HWYQQKPEKAPKSLIYDTSKLASGVPSRFSG |
| | | | SGSGTDYTLTISSLQPEDFATYYCQQWSSNP |
| | | | QYTFGQGTKLEIK |
| SEQ ID NO: 3214 | VL | D-H.30 | DIVLTQSPDSLAVSLGERATINCSVSSSVSYM |
| | | | HWYQQKPGQPPKLLIYDTSKLASGVPDRFS |
| | | | GSGSGTDYTLTISSLQAEDVAVYYCQQWSS |
| | | | NPQYTFGQGTKLEIK |
| SEQ ID NO: 3215 | VL | D-H.31 | EIVLTQTPLSLSITPGEQASMSCSVSSSVSYM |
| | | | HWYLQKARPVPKLLIYDTSKLASGVPDRFS |
| | | | GSGSGTDYTLKISRVEAEDFGVYYCQQWSS |
| | | | NPQYTFGQGTKLEIK |
| SEQ ID NO: 3216 | VL | D-H.32 | EIVLTQTPLSLSITPGEQASISCSVSSSVSYMH |
| | | | WYLQKARPVPKLLIYDTSKLASGVPDRFSGS |
| | | | GSGTDYTLKISRVEAEDFGVYYCQQWSSNP |
| | | | QYTFGQGTKLEIK |
| SEQ ID NO: 3217 | VL | D-H.33 | DIVLTQSPLSLPVTPGEPASISCSVSSSVSYMH |
| | | | WYLQKPGQSPKLLIYDTSKLASGVPDRFSGS |
| | | | GSGTDYTLKISRVEAEDVGVYYCQQWSSNP |
| | | | QYTFGQGTKLEIK |
| SEQ ID NO: 3218 | VL | D-H.34 | DIVLTQSPLSLPVTLGQPASISCSVSSSVSYM |
| | | | HWYQQRPGQSPKRLIYDTSKLASGVPDRFS |
| | | | GSGSGTDYTLKISRVEAEDVGVYYCQQWSS |
| | | | NPQYTFGQGTKLEIK |
| SEQ ID NO: 3219 | VL | D-H.35 | DIVLTQTPLSLPVTPGEPASISCSVSSSVSYM |
| | | | HWYLQKPGQSPKLLIYDTSKLASGVPDRFSG |
| | | | SGSGTDYTLKISRVEAEDVGVYYCQQWSSN |
| | | | PQYTFGQGTKLEIK |
| SEQ ID NO: 3220 | VL | D-H.36 | DIVLTQTPLSLSVTPGQPASISCSVSSSVSYM |
| | | | HWYLQKPGQSPKLLIYDTSKLASGVPDRFSG |
| | | | SGSGTDYTLKISRVEAEDVGVYYCQQWSSN |
| | | | PQYTFGQGTKLEIK |
| SEQ ID NO: 3221 | VL | D-H.37 | DIVLTQTPLSLSVTPGQPASISCSVSSSVSYM |
| | | | HWYLQKPGQPPKLLIYDTSKLASGVPDRFSG |
| | | | SGSGTDYTLKISRVEAEDVGVYYCQQWSSN |
| | | | PQYTFGQGTKLEIK |
| SEQ ID NO: 3222 | VL | D-H.38 | DIQLIQSPSFLSASVGDRVSIICSVSSSVSYMH |
| | | | WYLQKPGKSPKLFIYDTSKLASGVSSRFSGR |
| | | | GSGTDYTLTIISLKPEDFAAYYCQQWSSNPQ |
| | | | YTFGQGTKLEIK |
| SEQ ID NO: 3223 | VL | D-H.39 | DIVLTQTPLSSPVTLGQPASISCSVSSSVSYM |
| | | | HWYQQRPGQPPKLLIYDTSKLASGVPDRFSG |
| | | | SGAGTDYTLKISRVEAEDVGVYYCQQWSSN |
| | | | PQYTFGQGTKLEIK |
| SEQ ID NO: 3224 | VL | D-H.40 | EITLTQSPAFMSATPGDKVNISCSVSSSVSYM |
| | | | HWYQQKPGEAPKFIIYDTSKLASGIPPRFSGS |
| | | | GYGTDYTLTINNIESEDAAYYYCQQWSSNP |
| | | | QYTFGQGTKLEIK |

Variable HEAVY chain (VH)

| | | | |
|---|---|---|---|
| SEQ ID NO: 3225 | VH | D-H.1 | EVQLVESGGGLVKPGGSLRLSCAVSGFTFRS |
| | | | YGMSWVRQAPGKGLEWVALISSGGSYTYY |
| | | | TDSVKGRFTISRDNSKNTLYLQMNSLKTEDT |
| | | | AVYYCSRHGGNFFDYWGQGTTVTVSS |
| SEQ ID NO: 3226 | VH | D-H.2 | EVQLVESGGALVKPGGSLRLSCAVSGFTFRS |
| | | | YGMSWVRQAPGKGLEWVALISSGGSYTYY |
| | | | TDSVKGRFTISRDNSKNTLYLQMNSLKTEDT |
| | | | AVYYCSRHGGNFFDYWGQGTTVTVSS |
| SEQ ID NO: 3227 | VH | D-H.3 | EVQLVESGGGLVQPGGSLRLSCAVSGFTFRS |
| | | | YGMSWVRQAPGKGLEWVALISSGGSYTYY |
| | | | TDSVKGRFTISRDNAKNTLYLQMNSLRAED |
| | | | TAVYYCSRHGGNFFDYWGQGTTVTVSS |
| SEQ ID NO: 3228 | VH | D-H.4 | EVQLVESGGGLVQPGGSLRLSCAVSGFTFRS |
| | | | YGMSWVRQAPGKGLEWVALISSGGSYTYY |
| | | | TDSVKGRFTISRDNAKNSLYLQMNSLRAED |
| | | | TAVYYCSRHGGNFFDYWGQGTTVTVSS |
| SEQ ID NO: 3229 | VH | D-H.5 | EVQLVESGGGLVQPGGSLRLSCAVSGFTFRS |
| | | | YGMSWVRQAPGKGLEWVALISSGGSYTYY |
| | | | TDSVKGRFTISRDNSKNSLYLQMNSLKTEDT |
| | | | AVYYCSRHGGNFFDYWGQGTTVTVSS |
| SEQ ID NO: 3230 | VH | D-H.6 | EVQLVESGGGLVQPGGSLRLSCAVSGFTFRS |
| | | | YGMSWVRQAPGKGLEWVALISSGGSYTYY |
| | | | TDSVKGRFTISRDNAKNSLYLQMNSLRAED |
| | | | MAVYYCSRHGGNFFDYWGQGTTVTVSS |
| SEQ ID NO: 3231 | VH | D-H.7 | EVQLVESGGGLVQPGGSLRLSCAVSGFTFRS |
| | | | YGMSWVRQAPGKGLEWVALISSGGSYTYY |
| | | | TDSVKGQFTISRDNAKNTLYLQMNSLRAED |
| | | | MAVYYCSRHGGNFFDYWGQGTTVTVSS |
| SEQ ID NO: 3232 | VH | D-H.8 | EVQLVESGGGLVKPGRSLRLSCTVSGFTFRS |
| | | | YGMSWVRQAPGKGLEWVALISSGGSYTYY |
| | | | TDSVKGRFTISRDNSKNILYLQMNSLKTEDT |
| | | | AVYYCSRHGGNFFDYWGQGTTVTVSS |
| SEQ ID NO: 3233 | VH | D-H.9 | EVQLVESGGGLVKPGGSLRLSCAVSGFTFRS |
| | | | YGMSWVRQAPGKGLEWVALISSGGSYTYY |
| | | | TDSVKGRFTISRDNAKNSLYLQMNSLRAED |
| | | | TAVYYCSRHGGNFFDYWGQGTTVTVSS |
| SEQ ID NO: 3234 | VH | D-H.10 | EVQLVESGGGLVQPGGSLKLSCAVSGFTFRS |
| | | | YGMSWVRQASGKGLEWVALISSGGSYTYY |
| | | | TDSVKGRFTISRDNSKNTLYLQMNSLKTEDT |
| | | | AVYYCSRHGGNFFDYWGQGTTVTVSS |
| SEQ ID NO: 3235 | VH | D-H.11 | QVQLVESGGGVVQPGGSLRLSCAVSGFTFRS |
| | | | YGMSWVRQAPGKGLEWVALISSGGSYTYY |
| | | | TDSVKGRFTISRDNSKNTLYLQMNSLRAEDT |
| | | | AVYYCSRHGGNFFDYWGQGTTVTVSS |
| SEQ ID NO: 3236 | VH | D-H.12 | QVQLVESGGGVVQPGRSLRLSCAVSGFTFRS |
| | | | YGMSWVRQAPGKGLEWVALISSGGSYTYY |
| | | | TDSVKGRFTISRDNSKNTLYLQMSSLRAEDT |
| | | | AVYYCSRHGGNFFDYWGQGTTVTVSS |
| SEQ ID NO: 3237 | VH | D-H.13 | EVQLVESGGGLVQPGGSLRLSCPVSGFTFRS |
| | | | YGMSWVRQAPGKGLEWVALISSGGSYTYY |
| | | | TDSVKGRFTISRDNANNSLYLQMNSLRAED |
| | | | TAVYYCSRHGGNFFDYWGQGTTVTVSS |
| SEQ ID NO: 3238 | VH | D-H.14 | EVQLVESGGGLVQPGRSLRLSCTVSGFTFRS |
| | | | YGMSWVRQAPGKGLEWVALISSGGSYTYY |
| | | | TDSVKGRFTISRDNSKNILYLQMNSLKTEDT |
| | | | AVYYCSRHGGNFFDYWGQGTTVTVSS |
| SEQ ID NO: 3239 | VH | D-H.15 | EVQLVESGGGLVQPGPSLRLSCTVSGFTFRS |
| | | | YGMSWVRQAPGKGLEWVALISSGGSYTYY |
| | | | TDSVKGRFTISRDNSKNILYLQMNSLKTEDT |
| | | | AVYYCSRHGGNFFDYWGQGTTVTVSS |
| SEQ ID NO: 3240 | VH | D-H.16 | EVQLVESGGGLVQPGGSLRLSCAVSGFTFRS |
| | | | YGMSWVRQAPGKGLEWVALISSGGSYTYY |
| | | | TDSVKGRFTISRDNSKNTLYLQMNSLRAEDT |
| | | | AVYYCSRHGGNFFDYWGQGTTVTVSS |
| SEQ ID NO: 3241 | VH | D-H.17 | EVQLVESGGGLVQPGGSLRLSCAVSGFTFRS |
| | | | YGMSWVRQAPGKGLEWVALISSGGSYTYY |
| | | | TDSVKGRFTISRDNAKNSLYLQMNSLRDED |
| | | | TAVYYCSRHGGNFFDYWGQGTTVTVSS |
| SEQ ID NO: 3242 | VH | D-H.18 | QVQLVESGGGLVKPGGSLRLSCAVSGFTFRS |
| | | | YGMSWVRQAPGKGLEWVALISSGGSYTYY |
| | | | TDSVKGRFTISRDNAKNSLYLQMNSLRAED |
| | | | TAVYYCSRHGGNFFDYWGQGTTVTVSS |
| SEQ ID NO: 3243 | VH | D-H.19 | QVQLVESGGGVVQPGRSLRLSCAVSGFTFRS |
| | | | YGMSWVRQAPGKGLEWVALISSGGSYTYY |
| | | | TDSVKGRFTISRDNSKNTLYLQMNSLRAEDT |
| | | | AVYYCSRHGGNFFDYWGQGTTVTVSS |
| SEQ ID NO: 3244 | VH | D-H.20 | EVQLLESGGGLVQPGGSLRLSCAVSGFTFRS |
| | | | YGMSWVRQAPGKGLEWVALISSGGSYTYY |
| | | | TDSVKGRFTISRDNSKNTLYLQMNSLRAEDT |
| | | | AVYYCSRHGGNFFDYWGQGTTVTVSS |
| SEQ ID NO: 3245 | VH | D-H.21 | EVQLVESGGGLVQPGGSLRLSCAVSGFTFRS |
| | | | YGMSWVRQAPGKGLEWVALISSGGSYTYY |
| | | | TDSVKGRFTISRHNSKNTLYLQMNSLRAEDT |
| | | | AVYYCSRHGGNFFDYWGQGTTVTVSS |
| SEQ ID NO: 3246 | VH | D-H.22 | EVQLVESGGGLIQPGGSLRLSCAVSGFTFRS |
| | | | YGMSWVRQPPGKGLEWVALISSGGSYTYYT |
| | | | DSVKGRFTISRDNSKNTLYLQMNSLRAEDT |
| | | | AVYYCSRHGGNFFDYWGQGTTVTVSS |
| SEQ ID NO: 3247 | VH | D-H.23 | EVQLVESGGGLIQPGGSLRLSCAVSGFTFRS |
| | | | YGMSWVRQAPGKGLEWVALISSGGSYTYY |
| | | | TDSVKGRFTISRDNSKNTLYLQMNSLRAEDT |
| | | | AVYYCSRHGGNFFDYWGQGTTVTVSS |
| SEQ ID NO: 3248 | VH | D-H.24 | EVQLVESGGGLVQPGRSLRLSCAVSGFTFRS |
| | | | YGMSWVRQAPGKGLEWVALISSGGSYTYY |
| | | | TDSVKGRFTISRDNAKNSLYLQMNSLRAED |
| | | | TALYYCSRHGGNFFDYWGQGTTVTVSS |
| SEQ ID NO: 3249 | VH | D-H.25 | QVQLVESGGGVVQPGRSLRLSCAVSGFTFRS |
| | | | YGMSWVRQAPGKGLEWVALISSGGSYTYY |
| | | | TDSVKGRFTISRDNSKNRLYLQMNSLRAEDT |
| | | | AVYYCSRHGGNFFDYWGQGTTVTVSS |
| SEQ ID NO: 3250 | VH | D-H.26 | QVQLVESGGGVVQPGRSLRLSCAVSGFTFRS |
| | | | YGMSWVRQAPGKGLEWVALISSGGSYTYY |
| | | | TDSVKGRFTISRDNSKNTLYLQMNSLRAEGT |
| | | | AVYYCSRHGGNFFDYWGQGTTVTVSS |
| SEQ ID NO: 3251 | VH | D-H.27 | QVQLVESGGGVVQPGRSLRLSCAVSGFTFRS |
| | | | YGMSWVRQAPGKGLEWVALISSGGSYTYY |
| | | | TDSVKGRFAISRDNSKNTLYLQMNSLRAED |
| | | | TAVYYCSRHGGNFFDYWGQGTTVTVSS |
| SEQ ID NO: 3252 | VH | D-H.28 | QVQLVDSGGGVVQPGRSLRLSCAVSGFTFR |
| | | | SYGMSWVRQAPGKGLEWVALISSGGSYTY |
| | | | YTDSVKGRFTISRDNSKNTLYLQMNSLRAE |
| | | | DTAVYYCSRHGGNFFDYWGQGTTVTVSS |
| SEQ ID NO: 3253 | VH | D-H.29 | EVQLVESGGGVVRPGGSLRLSCAVSGFTFRS |
| | | | YGMSWVRQAPGKGLEWVALISSGGSYTYY |
| | | | TDSVKGRFTISRDNAKNSLYLQMNSLRAED |
| | | | TALYHCSRHGGNFFDYWGQGTTVTVSS |
| SEQ ID NO: 3254 | VH | D-H.30 | EVQLVESGGVVVQPGGSLRLSCAVSGFTFRS |
| | | | YGMSWVRQAPGKGLEWVALISSGGSYTYY |
| | | | TDSVKGRFTISRDNSKNSLYLQMNSLRAEDT |
| | | | ALYYCSRHGGNFFDYWGQGTTVTVSS |
| SEQ ID NO: 3255 | VH | D-H.31 | EVQLVESGGGVVQPGGSLRLSCAVSGFTFRS |
| | | | YGMSWVRQAPGKGLEWVALISSGGSYTYY |
| | | | TDSVKGRFTISRDNSKNSLYLQMNSLRTEDT |
| | | | ALYYCSRHGGNFFDYWGQGTTVTVSS |
| SEQ ID NO: 3256 | VH | D-H.32 | EVQLVESGGVVVQPGGSLRLSCAVSGFTFRS |
| | | | YGMSWVRQAPGKGLEWVALISSGGSYTYY |
| | | | TDSVKGRFTISRDNSKNSLYLQMNSLRTEDT |
| | | | ALYYCSRHGGNFFDYWGQGTTVTVSS |
| SEQ ID NO: 3257 | VH | D-H.33 | EVQLVETGGGLIQPGGSLRLSCAVSGFTFRS |
| | | | YGMSWVRQAPGKGLEWVALISSGGSYTYY |
| | | | TDSVKGRFTISRDNSKNTLYLQMNSLRAEDT |
| | | | AVYYCSRHGGNFFDYWGQGTTVTVSS |
| SEQ ID NO: 3258 | VH | D-H.34 | EVQLVESGGGLVQPGGSLRLSCAVSGFTFRS |
| | | | YGMSWVRQATGKGLEWVALISSGGSYTYY |
| | | | TDSVKGRFTISRENAKNSLYLQMNSLRAGD |
| | | | TAVYYCSRHGGNFFDYWGQGTTVTVSS |
| SEQ ID NO: 3259 | VH | D-H.35 | EVQLVESRGVLVQPGGSLRLSCAVSGFTFRS |
| | | | YGMSWVRQAPGKGLEWVALISSGGSYTYY |
| | | | TDSVKGRFTISRDNSKNTLHLQMNSLRAEDT |
| | | | AVYYCSRHGGNFFDYWGQGTTVTVSS |
| SEQ ID NO: 3260 | VH | D-H.36 | EVQLVESGGGLVQPGRSLRLSCAVSGFTFRS |
| | | | YGMSWVRQAPGKGLEWVALISSGGSYTYY |
| | | | TDSVKGRFTISRDNAKNSLYLQMNSLRAED |
| | | | MALYYCSRHGGNFFDYWGQGTTVTVSS |
| SEQ ID NO: 3261 | VH | D-H.37 | QVQLVESGGGLVQPGGSLRLSCSVSGFTFRS |
| | | | YGMSWVRQAPGKGLEWVALISSGGSYTYY |
| | | | TDSVKGRFTISRDNSKNTLYLQMNSLRAEDT |
| | | | AVYYCSRHGGNFFDYWGQGTTVTVSS |
| SEQ ID NO: 3262 | VH | D-H.38 | EVQLVESGGGLVQPGGSLRLSCSVSGFTFRS |
| | | | YGMSWVRQAPGKGLEWVALISSGGSYTYY |
| | | | TDSVKGRFTISRDNSKNTLYLQMSSLRAEDT |
| | | | AVYYCSRHGGNFFDYWGQGTTVTVSS |
| SEQ ID NO: 3263 | VH | D-H.39 | QVQLVESGGGVVQPGRSLRLSCAVSGFTFRS |
| | | | YGMSWVRQAPGKGLEWVALISSGGSYTYY |
| | | | TDSVKGRFTISRDNSTNTLFLQMNSLRAEDT |
| | | | AVYYCSRHGGNFFDYWGQGTTVTVSS |
| SEQ ID NO: 3264 | VH | D-H.40 | QVQLLESGGGLVKPGGSLRLSCAVSGFTFRS |
| | | | YGMSWVRQAPGKGLEWVALISSGGSYTYY |
| | | | TDSVKGRFTISRDNAKNSLYLQMNSLRAED |
| | | | TAVYYCSRHGGNFFDYWGQGTTVTVSS |
| SEQ ID NO: 3265 | VH | D-H.41 | EVQLVESGEGLVQPGGSLRLSCAVSGFTFRS |
| | | | YGMSWVRQAPGKGLEWVALISSGGSYTYY |
| | | | TDSVKGRFTISRDNSKNTLYLQMGSLRAED |
| | | | MAVYYCSRHGGNFFDYWGQGTTVTVSS |
| SEQ ID NO: 3266 | VH | D-H.42 | EVQLVESGGGLVQPGGSLRLSCAVSGFTFRS |
| | | | YGMSWVRQAPGKGLEWVALISSGGSYTYY |
| | | | TDSVKGRFTISRDNSKNTLYLQMGSLRAED |
| | | | MAVYYCSRHGGNFFDYWGQGTTVTVSS |
| SEQ ID NO: 3267 | VH | D-H.43 | EVQLVESGGGLVQPGGSLRLSCSVSGFTFRS |
| | | | YGMSWVRQAPGKGLEWVALISSGGSYTYY |
| | | | TDSVKGRFTISRDNSKNTLYVQMSSLRAEDT |
| | | | AVYYCSRHGGNFFDYWGQGTTVTVSS |
| SEQ ID NO: 3268 | VH | D-H.44 | EVQLVESGGGLVQPGGSLRLSCAVSGFTFRS |
| | | | YGMSWVRQAPGKGLEWVALISSGGSYTYY |
| | | | TDSVKGRFIISRDNSRNSLYLQKNRRRAEDM |
| | | | AVYYCSRHGGNFFDYWGQGTTVTVSS |
| SEQ ID NO: 3269 | VH | D-H.45 | EVQLVESGGGLVQPGGSLRLSCAVSGFTFRS |
| | | | YGMSWVHQAPGKGLEWVALISSGGSYTYY |
| | | | TDSVKGRFIISRDNSRNTLYLQTNSLRAEDT |
| | | | AVYYCSRHGGNFFDYWGQGTTVTVSS |
| SEQ ID NO: 3270 | VH | D-H.46 | EVHLVESGGGLVQPGGALRLSCAVSGFTFRS |
| | | | YGMSWVRQATGKGLEWVALISSGGSYTYY |
| | | | TDSVKGRFTISRENAKNSLYLQMNSLRAGD |
| | | | TAVYYCSRHGGNFFDYWGQGTTVTVSS |
| SEQ ID NO: 3271 | VH | D-H.47 | EVQLVESGGGLVQPRGSLRLSCAVSGFTFRS |
| | | | YGMSWVRQAPGKGLEWVALISSGGSYTYY |
| | | | TDSVKGRFTISRDNSKNTLYLQMNNLRAEG |
| | | | TAVYYCSRHGGNFFDYWGQGTTVTVSS |
| SEQ ID NO: 3272 | VH | D-H.48 | EVQLVESGGGLVQPRGSLRLSCAVSGFTFRS |
| | | | YGMSWVRQAPGKGLEWVALISSGGSYTYY |
| | | | TDSVKGRFTISRDNSKNTLYLQMNNLRAEG |
| | | | TAAYYCSRHGGNFFDYWGQGTTVTVSS |
| SEQ ID NO: 3273 | VH | D-H.49 | QVQLVQSGAEVKKPGASVKVSCKVSGFTFR |
| | | | SYGMSWVRQAPGKGLEWVALISSGGSYTY |
| | | | YTDSVKGRFTITRDNSTNTLYMELSSLRSED |
| | | | TAVYYCSRHGGNFFDYWGQGTTVTVSS |
| SEQ ID NO: 3274 | VH | D-H.50 | QVQLVQSGSELKKPGASVKVSCKVSGFTFRS |
| | | | YGMSWVRQAPGQGLEWVALISSGGSYTYY |
| | | | TDSVKGRFVISRDNSVNTLYLQISSLKAEDT |
| | | | AVYYCSRHGGNFFDYWGQGTTVTVSS |

TABLE 13
Amino acid sequences for additional anti-TCRβ V antibodies. Amino acid and
nucleotide sequences for murine and humanized antibody molecules which bind to various
TCRVB families are disclosed. The amino acid the heavy and light chain CDRs, and the amino
acid and nucleotide sequences of the heavy and light chain variable regions, and the heavy and
light chains are shown. Antibodies disclosed in the table include, MPB2D5, CAS1.1.3,
IMMU222, REA1062, and JOVI-3. MPB2D5 binds human TCRβV 20-1 (TCRβV2 per old
nomenclature). CAS1.1.3 binds human TCRβV 27 (TCRβV14 per old nomenclature). IMMU 222
binds human TCRβV 6-5, TCRβV 6-6, or TCRβV 6-9 (TCRβV13.1 per old nomenclature).
REA1062 binds human TCRβV 5-1). JOVI-3 binds human TCRβV 28 (TCRβV3. 1 per old
nomenclature). IMMU546 binds human TCRβV 2.
MPB2D5 (murine), also referred to here as BJ1188, BJ1190 and REA654; or Antibody G
Binds to human TCRVβ 20-1

| | | |
|---|---|---|
| SEQ ID NO: 1102 | HC CDR1 (Kabat) | SAYMH |
| SEQ ID NO: 1103 | HC CDR2 (Kabat) | RIDPATGKTKYAPKFQA |
| SEQ ID NO: 1104 | HC CDR3 (Kabat) | SLNWDYGLDY |
| SEQ ID NO: 1105 | HC CDR1 (Chothia) | GFNIKSA |
| SEQ ID NO: 1106 | HC CDR2 (Chothia) | DPATGK |
| SEQ ID NO: 1104 | HC CDR3 (Chothia) | SLNWDYGLDY |
| SEQ ID NO: 3640 | HC CDR1 (Combined) | GFNIKSAYMH |
| SEQ ID NO: 1103 | HC CDR2 (Combined) | RIDPATGKTKYAPKFQA |
| SEQ ID NO: 1104 | HC CDR3 (Combined) | SLNWDYGLDY |
| SEQ ID NO: 1107 | LC CDR1 (Kabat) | RASKSVSILGTHLIH |
| SEQ ID NO: 1108 | LC CDR2 (Kabat) | AASNLES |
| SEQ ID NO: 1109 | LC CDR3 (Kabat) | QQSIEDPWT |
| SEQ ID NO: 1110 | LC CDR1 (Chothia) | SKSVSILGTHL |
| SEQ ID NO: 1108 | LC CDR2 (Chothia) | AASNLES |
| SEQ ID NO: 1109 | LC CDR3 (Chothia) | QQSIEDPWT |
| SEQ ID NO: 1107 | LC CDR1 (Combined) | RASKSVSILGTHLIH |
| SEQ ID NO: 1108 | LC CDR2 (Combined) | AASNLES |
| SEQ ID NO: 1109 | LC CDR3(Combined) | QQSIEDPWT |
| SEQ ID NO: 1111 | VL | DIVLTQSPASLAVSLGQRATISCRASKSVSILGTH |
| | | LIHWYQQKPGQPPKLLIYAASNLESGVPARFSGS |
| | | GSETVFTLNIHPVEEEDAATYFCQQSIEDPWTFGG |
| | | GTKLGIK |
| SEQ ID NO: 1112 | VH | EVQLQQSVADLVRPGASLKLSCTASGFNIKSAYM |
| | | HWVIQRPDQGPECLGRIDPATGKTKYAPKFQAK |
| | | ATITADTSSNTAYLQLSSLTSEDTAIYYCTRSLNW |
| | | DYGLDYWGQGTSVTVSS |

VH for MPB2D5 (humanized) also referred to as Antibody G-H (humanized)
Binds to human TCRVβ 20-1

| | | |
|---|---|---|
| SEQ ID NO: 1113 | VH - 1 | QVQLVQSGAEVKKPGASVKVSCKASGFNIKSAY |
| | | MHWVRQAPGQGLEWMGRIDPATGKTKYAPKFQ |
| | | ARVTMTADTSTNTAYMELSSLRSEDTAVYYCAR |
| | | SLNWDYGLDYWGQGTLVTVSS |
| SEQ ID NO: 1114 | VH - 2 | QVQLVQSGAEVKKPGASVKVSCKASGFNIKSAY |
| | | MHWVRQAPGQEPGCMGRIDPATGKTKYAPKFQ |
| | | ARVTMTADTSINTAYTELSSLRSEDTATYYCARS |
| | | LNWDYGLDYWGQGTLVTVSS |
| SEQ ID NO: 1115 | VH - 3 | QVQLVQSGAEVKKPGSSVKVSCKASGFNIKSAY |
| | | MHWVRQAPGQGLEWMGRIDPATGKTKYAPKFQ |
| | | ARVTITADTSTNTAYMELSSLRSEDTAVYYCARS |
| | | LNWDYGLDYWGQGTLVTVSS |
| SEQ ID NO: 1116 | VH - 4 | QVQLVQSGAEVKKPGASVKVSCKASGFNIKSAY |
| | | MHWVRQAPGQRLEWMGRIDPATGKTKYAPKFQ |
| | | ARVTITADTSANTAYMELSSLRSEDTAVYYCARS |
| | | LNWDYGLDYWGQGTLVTVSS |

VL for MPB2D5 (humanized) also referred to as Antibody G-H (humanized)
Binds to human TCRβV 20-1

| | | |
|---|---|---|
| SEQ ID NO: 1117 | VL - 1 | EIVLTQSPATLSLSPGERATLSCRASKSVSILGTHL |
| | | IHWYQQKPGQAPRLLIYAASNLESGIPARFSGSGS |
| | | ETDFTLTISSLEPEDFAVYFCQQSIEDPFGGGTKV |
| | | EIK |
| SEQ ID NO: 1118 | VL - 2 | EIVLTQSPATLSLSPGERATLSCRASKSVSILGTHL |
| | | IHWYQQKPGLAPRLLIYAASNLESGIPDRFSGSGS |
| | | ETDFTLTISRLEPEDFAVYFCQQSIEDPFGGGTKV |
| | | EIK |
| SEQ ID NO: 1119 | VL - 3 | EIVLTQSPGTLSLSPGERATLSCRASKSVSILGTHL |
| | | IHWYQQKPGQAPRLLIYAASNLESGIPDRFSGSGS |
| | | ETDFTLTISRLEPEDFAVYFCQQSIEDPFGGGTKV |
| | | EIK |

CAS1.1.3 (murine) also referred to herein as BJ1460; or Antibody H
Binds to human TCRVβ 27

| | | |
|---|---|---|
| SEQ ID NO: 1120 | HC CDR1 (Kabat) | DTYMY |
| SEQ ID NO: 1121 | HC CDR2 (Kabat) | RIDPANGNTKYDPKFQD |
| SEQ ID NO: 1122 | HC CDR3 (Kabat) | GSYYYAMDY |
| SEQ ID NO: 1123 | HC CDR1 (Chothia) | GFKTEDT |
| SEQ ID NO: 1124 | HC CDR2 (Chothia) | DPANGN |
| SEQ ID NO: 1122 | HC CDR3 (Chothia) | GSYYYAMDY |
| SEQ ID NO: 1125 | HC CDR1 (Combined) | GFKTEDTYMY |
| SEQ ID NO: 1121 | HC CDR2 (Combined) | RIDPANGNTKYDPKFQD |
| SEQ ID NO: 1122 | HC CDR3(Combined) | GSYYYAMDY |
| SEQ ID NO: 1126 | LC CDR1 (Kabat) | RASESVDSYGNSFMH |
| SEQ ID NO: 1127 | LC CDR2 (Kabat) | RASNLES |
| SEQ ID NO: 1128 | LC CDR3 (Kabat) | QQSNEDPYT |
| SEQ ID NO: 3641 | LC CDR1 (Chothia) | SESVDSYGNSF |
| SEQ ID NO: 1127 | LC CDR2 (Chothia) | RASNLES |
| SEQ ID NO: 1128 | LC CDR3 (Chothia) | QQSNEDPYT |
| SEQ ID NO: 1126 | LC CDR1 (Combined) | RASESVDSYGNSFMH |
| SEQ ID NO: 1127 | LC CDR2 (Combined) | RASNLES |
| SEQ ID NO: 1128 | LC CDR3(Combined) | QQSNEDPYT |
| SEQ ID NO: 1129 | VL | DIVLTQSPASLAVSLGQRATISCRASESVDSYGNS |
| | | FMHWYQQKPGQPPKLLIYRASNLESGIPARFSGS |
| | | GSRTDFTLTINPVEADDVATYYCQQSNEDPYTFG |
| | | GGTKLEIK |
| SEQ ID NO: 1130 | VH | EVQLQQSGAELVKPGASVKLSCTASGFKTEDTY |
| | | MYWVKQRPEQGLEWIGRIDPANGNTKYDPKFQ |
| | | DKATITADSSSNTAYLQLSSLPSEDTAVYYCARG |
| | | SYYYAMDYWGQGTSVTVSS |

VH for CAS1.1.3 (humanized) also referred to as Antibody H-H (humanized)
Binds to human TCRVβ 27

| | | |
|---|---|---|
| SEQ ID NO: 1131 | VH - 1 | QVQLVQSGAEVKKPGSSVKVSCKASGFKTEDTY |
| | | MYWVRQAPGQGLEWIGRIDPANGNTKYDPKFQ |
| | | DRATITADSSTNTAYMELSSLRSEDTAVYYCARG |
| | | SYYYAMDYWGQGTLVTVSS |
| SEQ ID NO: 1132 | VH - 2 | QVQLVQSGAEVKKPGASVKVSCKASGFKTEDTY |
| | | MYWVRQAPGQRLEWIGRIDPANGNTKYDPKFQ |
| | | DRATITADSSANTAYMELSSLRSEDTAVYYCARG |
| | | SYYYAMDYWGQGTLVTVSS |
| SEQ ID NO: 1133 | VH - 3 | EVQLVESGGGLVQPGGSLKLSCAASGFKTEDTY |
| | | MYWVRQASGKGLEWIGRIDPANGNTKYDPKFQ |
| | | DRATISADSSKNTAYLQMNSLKTEDTAVYYCAR |
| | | GSYYYAMDYWGQGTLVTVSS |
| SEQ ID NO: 1134 | VH - 4 | EVQLVQSGAEVKKPGESLRISCKASGFKTEDTYM |
| | | YWVRQMPGKGLEWIGRIDPANGNTKYDPKFQD |
| | | QATISADSSINTAYLQWSSLKASDTAMYYCARGS |
| | | YYYAMDYWGQGTLVTVSS |
| SEQ ID NO: 1135 | VH - 5 | QVQLVQSGSELKKPGASVKVSCKASGFKTEDTY |
| | | MYWVRQAPGQGLEWIGRIDPANGNTKYDPKFQ |
| | | DRAVISADSSVNTAYLQISSLKAEDTAVYYCARG |
| | | SYYYAMDYWGQGTLVTVSS |

VL for CAS1.1.3 (humanized) also referred to as Antibody H-H (humanized)
Binds to human TCRVβ 27

| | | |
|---|---|---|
| SEQ ID NO: 1136 | VL - 1 | DIVLTQSPDSLAVSLGERATINCRASESVDSYGNS |
| | | FMHWYQQKPGQPPKLLIYRASNLESGVPDRFSGS |
| | | GSRTDFTLTISSLQAEDVAVYYCQQSNEDPYTFG |
| | | QGTKLEIK |
| SEQ ID NO: 1137 | VL - 2 | EIVLTQSPATLSLSPGERATLSCRASESVDSYGNS |
| | | FMHWYQQKPGQAPKLLIYRASNLESGIPARFSGS |
| | | GSRTDFTLTISRLEPEDFAVYYCQQSNEDPYTFGQ |
| | | GTKLEIK |
| SEQ ID NO: 1138 | VL - 3 | DIQLTQSPSSLSASVGDRVTITCRASESVDSYGNS |
| | | FMHWYQQKPGQAPKLLIYRASNLESGVPSRFSGS |
| | | GSRTDFTLTISSLQPEDVATYYCQQSNEDPYTFG |
| | | QGTKLEIK |
| SEQ ID NO: 1139 | VL - 4 | AIQLTQSPSSLSASVGDRVTITCRASESVDSYGNS |
| | | FMHWYQQKPGKAPKLLIYRASNLESGVPSRFSGS |
| | | GSRTDFTLTISSLQPEDFATYYCQQSNEDPYTFGQ |
| | | GTKLEIK |
| SEQ ID NO: 1140 | VL - 5 | EIVLTQSPDFQSVTPKEKVTITCRASESVDSYGNS |
| | | FMHWYQQKPDQSPKLLIYRASNLESGVPSRFSGS |
| | | GSRTDFTLTINSLEAEDAATYYCQQSNEDPYTFG |
| | | QGTKLEIK |

IMMU222 (murine) also referred to as BJ1461; or Antibody I
Binds to human TCRVβ 6-5, 6-6, 6-9

| | | |
|---|---|---|
| SEQ ID NO: 1141 | HC CDR1 (Kabat) | SYAMS |
| SEQ ID NO: 1142 | HC CDR2 (Kabat) | HISNGGDYIYYADTVKG |
| SEQ ID NO: 1143 | HC CDR3 (Kabat) | PSYYSDPWFFDV |
| SEQ ID NO: 1144 | HC CDR1 (Chothia) | GFTFRSY |
| SEQ ID NO: 1145 | HC CDR2 (Chothia) | SNGGDY |
| SEQ ID NO: 1143 | HC CDR3 (Chothia) | PSYYSDPWFFDV |
| SEQ ID NO: 1146 | HC CDR1 (Combined) | GFTFRSYAMS |
| SEQ ID NO: 1142 | HC CDR2 (Combined) | HISNGGDYIYYADTVKG |
| SEQ ID NO: 1143 | HC CDR3(Combined) | PSYYSDPWFFDV |
| SEQ ID NO: 1147 | LC CDR1 (Kabat) | SAGSSVSFMH |
| SEQ ID NO: 1148 | LC CDR2 (Kabat) | DTSKLAS |
| SEQ ID NO: 1149 | LC CDR3 (Kabat) | LQGSGFPLT |
| SEQ ID NO: 1150 | LC CDR1 (Chothia) | GSSVSF |
| SEQ ID NO: 1148 | LC CDR2 (Chothia) | DTSKLAS |
| SEQ ID NO: 1149 | LC CDR3 (Chothia) | LQGSGFPLT |
| SEQ ID NO: 1147 | LC CDR1 (Combined) | SAGSSVSFMH |
| SEQ ID NO: 1148 | LC CDR2 (Combined) | DTSKLAS |
| SEQ ID NO: 1149 | LC CDR3(Combined) | LQGSGFPLT |
| SEQ ID NO: 1151 | VL | ENVLTQSPAIMSASPGEKVTMTCSAGSSVSFMH |
| | | WYQQKSSTSPKLWIYDTSKLASGVPGRFSGSGSG |
| | | NSFSLTISSMEAEDVAIYYCLQGSGFPLTFGSGTK |
| | | LEIK |
| SEQ ID NO: 1152 | VH | DVKLVESGEGLVKPGGSLKLSCAASGFTFRSYA |
| | | MSWVRQTPEKRLEWVAHISNGGDYIYYADTVK |
| | | GRFTISRDNARNTLYLQMSSLKSEDTAMYYCTRP |
| | | SYYSDPWFFDVWGTGTTVTVSS |

VH for IMMU222 (humanized) also referred to as Antibody I-H
Binds to human TCRVβ 6-5, 6-6, 6-9

| | | |
|---|---|---|
| SEQ ID NO: 1153 | VH - 1 | EVQLVESGGGLVQPGGSLRLSCAASGFTFRSYA |
| | | MSWVRQAPGKGLEWVAHISNGGDYIYYADTVK |
| | | GRFTISRDNAKNSLYLQMNSLRAEDTAVYYCTR |
| | | PSYYSDPWFFDVWGQGTTVTVSS |
| SEQ ID NO: 1154 | VH - 2 | QVQLVESGGGVVQPGRSLRLSCAASGFTFRSYA |
| | | MSWVRQAPGKGLEWVAHISNGGDYIYYADTVK |
| | | GRFTISRDNSKNTLYLQMSSLRAEDTAVYYCTRP |
| | | SYYSDPWFFDVWGQGTTVTVSS |
| SEQ ID NO: 1155 | VH - 3 | EVQLVESGGGLVQPGGSLRLSCAASGFTFRSYA |
| | | MSWVRQAPGKGLEWVAHISNGGDYIYYADTVK |
| | | GRFTISRDNSKNTLYLQMNSLRAEDTAVYYCTRP |
| | | SYYSDPWFFDVWGQGTTVTVSS |
| SEQ ID NO: 1156 | VH - 4 | QVQLVQSGSELKKPGASVKVSCKASGFTFRSYA |
| | | MSWVRQAPGQGLEWVAHISNGGDYIYYADTVK |
| | | GRFVISRDNSVNTLYLQISSLKAEDTAVYYCTRPS |
| | | YYSDPWFFDVWGQGTTVTVSS |
| SEQ ID NO: 1157 | VH - 5 | QVQLVQSGAEVKKPGASVKVSCKASGFTFRSYA |
| | | MSWVRQAPGQRLEWVAHISNGGDYIYYADTVK |
| | | GRFTITRDNSANTLYMELSSLRSEDTAVYYCTRP |
| | | SYYSDPWFFDVWGQGTTVTVSS |

VL for IMMU222 (humanized) ) also referred to as Antibody I-H
Binds to human TCRVβ 6-5, 6-6, 6-9

| | | |
|---|---|---|
| SEQ ID NO: 1158 | VL - 1 | ENVLTQSPATLSLSPGERATLSCSAGSSVSFMHW |
| | | YQQKPGQAPKLLIYDTSKLASGIPARFSGSGSGN |
| | | DFTLTISSLEPEDFAVYYCLQGSGFPLTFGQGTKL |
| | | EIK |
| SEQ ID NO: 1159 | VL - 2 | ENVLTQSPDFQSVTPKEKVTITCSAGSSVSFMHW |
| | | YQQKPDQSPKLLIYDTSKLASGVPSRFSGSGSGN |
| | | DFTLTINSLEAEDAATYYCLQGSGFPLTFGQGTK |
| | | LEIK |
| SEQ ID NO: 1160 | VL - 3 | DNQLTQSPSSLSASVGDRVTITCSAGSSVSFMHW |
| | | YQQKPGKVPKLLIYDTSKLASGVPSRFSGSGSGN |
| | | DFTLTISSLQPEDVATYYCLQGSGFPLTFGQGTKL |
| | | EIK |
| SEQ ID NO: 1161 | VL - 4 | ANQLTQSPSSLSASVGDRVTITCSAGSSVSFMHW |
| | | YQQKPGKAPKLLIYDTSKLASGVPSRFSGSGSGN |
| | | DFTLTISSLQPEDFATYYCLQGSGFPLTFGQGTKL |
| | | EIK |
| SEQ ID NO: 1162 | VL - 5 | DNVLTQSPDSLAVSLGERATINCSAGSSVSFMHW |
| | | YQQKPGQPPKLLIYDTSKLASGVPDRFSGSGSGN |
| | | DFTLTISSLQAEDVAVYYCLQGSGFPLTFGQGTK |
| | | LEIK |

REA1062 (murine), also referred to as BJ1189 or as Antibody J
Binds to human TCRVβ 5-1

| | | |
|---|---|---|
| SEQ ID NO: 1163 | HC CDR1 (Kabat) | DYNIH |
| SEQ ID NO: 1164 | HC CDR2 (Kabat) | YINPYNGRTGYNQKFKA |
| SEQ ID NO: 1165 | HC CDR3 (Kabat) | WDGSSYFDY |
| SEQ ID NO: 1166 | HC CDR1 (Chothia) | GYTFTDYNIH |
| SEQ ID NO: 1167 | HC CDR2 (Chothia) | NPYNGR |
| SEQ ID NO: 1165 | HC CDR3 (Chothia) | WDGSSYFDY |
| SEQ ID NO: 1166 | HC CDR1 (Combined) | GYTFTDYNIH |
| SEQ ID NO: 1164 | HC CDR2 (Combined) | YINPYNGRTGYNQKFKA |
| SEQ ID NO: 1165 | HC CDR3(Combined) | WDGSSYFDY |
| SEQ ID NO: 1168 | LC CDR1 (Kabat) | SASSSVSYMH |
| SEQ ID NO: 1169 | LC CDR2 (Kabat) | EISKLAS |
| SEQ ID NO: 1170 | LC CDR3 (Kabat) | QQWNYPLLT |
| SEQ ID NO: 1297 | LC CDR1 (Chothia) | SSSVSY |
| SEQ ID NO: 1169 | LC CDR2 (Chothia) | EISKLAS |
| SEQ ID NO: 1170 | LC CDR3 (Chothia) | QQWNYPLLT |
| SEQ ID NO: 1168 | LC CDR1 (Combined) | SASSSVSYMH |
| SEQ ID NO: 1169 | LC CDR2 (Combined) | EISKLAS |
| SEQ ID NO: 1170 | LC CDR3(Combined) | QQWNYPLLT |
| SEQ ID NO: 1171 | VL | EIVLTQSPAITAASLGQKVTITCSASSSVSYMHWY |
| | | QQKSGTSPKPWIYEISKLASGVPARFSGSGSGTSY |
| | | SLTISSMEAEDAAIYYCQQWNYPLLTFGAGTKLE |
| | | LK |
| SEQ ID NO: 1172 | VH | EVQLQQSGPVLVKPGASVRMSCKASGYTFTDYN |
| | | IHWVKQSHGRSLEWVGYINPYNGRTGYNQKFKA |
| | | KATLTVDKSSSTAYMDLRSLTSEDSAVYYCARW |
| | | DGSSYFDYWGQGTTLTVSS |

VH for REA1062 (humanized) also referred to as Antibody J-H
Binds to human TCRVβ 5-1

| | | |
|---|---|---|
| SEQ ID NO: 1173 | VH - 1 | QVQLVQSGAEVKKPGSSVKVSCKASGYTFTDYN |
| | | IHWVRQAPGQGLEWVGYINPYNGRTGYNQKFK |
| | | ARATLTVDKSTSTAYMELSSLRSEDTAVYYCAR |
| | | WDGSSYFDYWGQGTTVTVSS |
| SEQ ID NO: 1174 | VH - 2 | QVQLVQSGAEVKKPGASVKVSCKASGYTFTDYN |
| | | IHWVRQAPGQGLEWVGYINPYNGRTGYNQKFK |
| | | ARATLTVDKSTSTAYMELRSLRSDDMAVYYCAR |
| | | WDGSSYFDYWGQGTTVTVSS |
| SEQ ID NO: 1175 | VH - 3 | QVQLVQSGAEVKKPGASVKVSCKASGYTFTDYN |
| | | IHWVRQATGQGLEWVGYINPYNGRTGYNQKFK |
| | | ARATLTVNKSISTAYMELSSLRSEDTAVYYCAR |
| | | WDGSSYFDYWGQGTTVTVSS |
| SEQ ID NO: 1176 | VH - 4 | EVQLVESGGGLVQPGRSLRLSCTASGYTFTDYNI |
| | | HWVRQAPGKGLEWVGYINPYNGRTGYNQKFKA |
| | | RATLSVDKSKSIAYLQMNSLKTEDTAVYYCARW |
| | | DGSSYFDYWGQGTTVTVSS |
| SEQ ID NO: 1177 | VH - 5 | QVQLVQSGSELKKPGASVKVSCKASGYTFTDYNI |
| | | HWVRQAPGQGLEWVGYINPYNGRTGYNQKFKA |
| | | RAVLSVDKSVSTAYLQISSLKAEDTAVYYCARW |
| | | DGSSYFDYWGQGTTVTVSS |

VL for REA1062 (humanized) also referred to as Antibody J-H
Binds to human TCRVβ 5-1

| | | |
|---|---|---|
| SEQ ID NO: 1178 | VL - 1 | EIVLTQSPATLSLSPGERATLSCSASSSVSYMHWY |
| | | QQKPGQAPKLLIYEISKLASGIPARFSGSGSGTDY |
| | | TLTISSLEPEDFAVYYCQQWNYPLLTFGQGTKLEI |
| | | K |
| SEQ ID NO: 1179 | VL - 2 | EIVLTQSPATLSLSPGERATLSCSASSSVSYMHWY |
| | | QQKPGQAPKLLIYEISKLASGIPARFSGSGSGTDY |
| | | TLTISRLEPEDFAVYYCQQWNYPLLTFGQGTKLE |
| | | IK |
| SEQ ID NO: 1180 | VL - 3 | EIVLTQSPDFQSVTPKEKVTITCSASSSVSYMHWY |
| | | QQKPDQSPKLLIYEISKLASGVPSRFSGSGSGTDY |
| | | TLTINSLEAEDAATYYCQQWNYPLLTFGQGTKLE |
| | | IK |
| SEQ ID NO: 1181 | VL - 4 | DIQLTQSPSFLSASVGDRVTITCSASSSVSYMHWY |
| | | QQKPGKAPKLLIYEISKLASGVPSRFSGSGSGTEY |
| | | TLTISSLQPEDFATYYCQQWNYPLLTFGQGTKLEI |
| | | K |
| SEQ ID NO: 1182 | VL - 5 | AIQLTQSPSSLSASVGDRVTITCSASSSVSYMHWY |
| | | QQKPGKAPKLLIYEISKLASGVPSRFSGSGSGTDY |
| | | TLTISSLQPEDFATYYCQQWNYPLLTFGQGTKLEI |
| | | K |
| SEQ ID NO: 1183 | VL - 6 | AIRLTQSPFSLSASVGDRVTITCSASSSVSYMHWY |
| | | QQKPAKAPKLFIYEISKLASGVPSRFSGSGSGTDY |
| | | TLTISSLQPEDFATYYCQQWNYPLLTFGQGTKLEI |
| | | K |
| SEQ ID NO: 1184 | VL - 7 | DIVLTQSPDSLAVSLGERATINCSASSSVSYMHW |
| | | YQQKPGQPPKLLIYEISKLASGVPDRFSGSGSGTD |
| | | YTLTISSLQAEDVAVYYCQQWNYPLLTFGQGTK |
| | | LEIK |

JOVI-3 (murine), also referred to as BJ1187 or Antibody K
Binds to human TCRVβ 28

| | | |
|---|---|---|
| SEQ ID NO: 1185 | HC CDR1 (Kabat) | GSWMN |
| SEQ ID NO: 1186 | HC CDR2 (Kabat) | RIYPGDGDTDYSGKFKG |
| SEQ ID NO: 1187 | HC CDR3 (Kabat) | SGYFNYVPVFDY |
| SEQ ID NO: 1188 | HC CDR1 (Chothia) | GYTFSGS |
| SEQ ID NO: 1189 | HC CDR2 (Chothia) | YPGDGD |
| SEQ ID NO: 1187 | HC CDR3 (Chothia) | SGYFNYVPVFDY |
| SEQ ID NO: 1190 | HC CDR1 (Combined) | GYTFSGSWMN |
| SEQ ID NO: 1186 | HC CDR2 (Combined) | RIYPGDGDTDYSGKFKG |
| SEQ ID NO: 1187 | HC CDR3(Combined) | SGYFNYVPVFDY |
| SEQ ID NO: 1191 | LC CDR1 (Kabat) | SANSTVGYIH |
| SEQ ID NO: 1192 | LC CDR2 (Kabat) | TTSNLAS |
| SEQ ID NO: 1193 | LC CDR3 (Kabat) | HQWSFYPT |
| SEQ ID NO: 1194 | LC CDR1 (Chothia) | NSTVGY |
| SEQ ID NO: 1192 | LC CDR2 (Chothia) | TTSNLAS |
| SEQ ID NO: 1193 | LC CDR3 (Chothia) | HQWSFYPT |
| SEQ ID NO: 1191 | LC CDR1 (Combined) | SANSTVGYIH |
| SEQ ID NO: 1192 | LC CDR2 (Combined) | TTSNLAS |
| SEQ ID NO: 1193 | LC CDR3(Combined) | HQWSFYPT |
| SEQ ID NO: 1195 | VL | QIVLTQSPAIMSASLGEEIALTCSANSTVGYIHWY |
| | | QQKSGTSPKLLIYTTSNLASGVPSRFSGSGSGTFY |
| | | SLTISSVEAEDAADYFCHQWSFYPTFGGGTKLEI |
| | | K |
| SEQ ID NO: 1196 | VH | QIQLQQSGPEVVKPGASVQISCKASGYTFSGSWM |
| | | NWVKQRPGKGLEWIGRIYPGDGDTDYSGKFKGR |
| | | ATLTADKSSSTAYMRLSSLTSEDSAVYFCARSGY |
| | | FNYVPVFDYWGQGTTLSVSS |

VH for JOVI-3 (humanized) also referred to as Antibody K-H
Binds to human TCRVβ 28

| | | |
|---|---|---|
| SEQ ID NO: 1197 | VH - 1 | QIQLVQSGAEVKKPGASVKVSCKASGYTFSGSW |
| | | MNWVRQAPGQGLEWIGRIYPGDGDTDYSGKFK |
| | | GRATLTADKSTSTAYMELSSLRSEDTAVYYCARS |
| | | GYFNYVPVFDYWGQGTTVTVSS |
| SEQ ID NO: 1198 | VH - 2 | QIQLVQSGAEVKKPGSSVKVSCKASGYTFSGSW |
| | | MNWVRQAPGQGLEWIGRIYPGDGDTDYSGKFK |
| | | GRATLTADKSTSTAYMELSSLRSEDTAVYYCARS |
| | | GYFNYVPVFDYWGQGTTVTVSS |
| SEQ ID NO: 1199 | VH - 3 | EIQLVQSGAEVKKPGESLKISCKASGYTFSGSWM |
| | | NWVRQMPGKGLEWIGRIYPGDGDTDYSGKFKG |
| | | QATLSADKSISTAYLQWSSLKASDTAMYYCARS |
| | | GYFNYVPVFDYWGQGTTVTVSS |
| SEQ ID NO: 1200 | VH - 4 | QIQLVQSGSELKKPGASVKVSCKASGYTFSGSW |
| | | MNWVRQAPGQGLEWIGRIYPGDGDTDYSGKFK |
| | | GRAVLSADKSVSTAYLQISSLKAEDTAVYYCARS |
| | | GYFNYVPVFDYWGQGTTVTVSS |
| SEQ ID NO: 1201 | VH - 5 | QIQLVQSGSELKKPGASVKVSCKASGYTFSGSW |
| | | MNWVRQAPGQGLEWIGRIYPGDGDTDYSGKFK |
| | | GRAVLSADKSVSMAYLQISSLKAEDTAVYYCAR |
| | | SGYFNYVPVFDYWGQGTTVTVSS |
| SEQ ID NO: 1202 | VH - 6 | EIQLVESGGGLVQPGRSLRLSCTASGYTFSGSWM |
| | | NWVRQAPGKGLEWIGRIYPGDGDTDYSGKFKGR |
| | | ATLSADKSKSIAYLQMNSLKTEDTAVYYCARSG |
| | | YFNYVPVFDYWGQGTTVTVSS |

VL for JOVI-3 (humanized) also referred to as Antibody K-H
Binds to human TCRVβ 28

| | | |
|---|---|---|
| SEQ ID NO: 1203 | VL - 1 | EIVLTQSPATLSLSPGERATLSCSANSTVGYIHWY |
| | | QQKPGQAPKLLIYTTSNLASGIPARFSGSGSGTDY |
| | | TLTISSLEPEDFAVYFCHQWSFYPTFGQGTKLEIK |
| SEQ ID NO: 1204 | VL - 2 | DIQLTQSPSFLSASVGDRVTITCSANSTVGYIHWY |
| | | QQKPGKAPKLLIYTTSNLASGVPSRFSGSGSGTEY |
| | | TLTISSLQPEDFATYFCHQWSFYPTFGQGTKLEIK |
| SEQ ID NO: 1205 | VL - 3 | EIVLTQSPATLSLSPGERATLSCSANSTVGYIHWY |
| | | QQKPGQAPKLLIYTTSNLASGIPARFSGSGPGTDY |
| | | TLTISSLEPEDFAVYFCHOWSFYPTFGQGTKLEIK |
| SEQ ID NO: 1206 | VL - 4 | DIVLTQSPDSLAVSLGERATINCSANSTVGYIHW |
| | | YQQKPGQPPKLLIYTTSNLASGVPDRFSGSGSGT |
| | | DYTLTISSLQAEDVAVYFCHQWSFYPTFGQGTKL |
| | | EIK |
| SEQ ID NO: 1207 | VL - 5 | EIVLTQSPDFQSVTPKEKVTITCSANSTVGYIHWY |
| | | QQKPDQSPKLLIYTTSNLASGVPSRFSGSGSGTDY |
| | | TLTINSLEAEDAATYFCHQWSFYPTFGQGTKLEI |
| | | K |

ZOE (murine), also referred to as BJ1538 or as Antibody L
Binds to human TCRVβ 4-1, 4-2, 4-3

| | | |
|---|---|---|
| SEQ ID NO: 1208 | HC CDR1 (Kabat) | DYYMY |
| SEQ ID NO: 1209 | HC CDR2 (Kabat) | TISGGGSYTYSPDSVKG |
| SEQ ID NO: 1210 | HC CDR3 (Kabat) | ERDIYYGNFNAMVY |
| SEQ ID NO: 1211 | HC CDR1 (Chothia) | GFTFSDY |
| SEQ ID NO: 1212 | HC CDR2 (Chothia) | SGGGSY |
| SEQ ID NO: 1210 | HC CDR3 (Chothia) | ERDIYYGNFNAMVY |
| SEQ ID NO: 1213 | HC CDR1 (Combined) | GFTFSDYYMY |
| SEQ ID NO: 1209 | HC CDR2 (Combined) | TISGGGSYTYSPDSVKG |
| SEQ ID NO: 1210 | HC CDR3(Combined) | ERDIYYGNFNAMVY |
| SEQ ID NO: 1214 | LC CDR1 (Kabat) | RASKSVSTSGYSYMH |
| SEQ ID NO: 1215 | LC CDR2 (Kabat) | LASNLES |
| SEQ ID NO: 1216 | LC CDR3 (Kabat) | QHSRDLPWT |
| SEQ ID NO: 1217 | LC CDR1 (Chothia) | SKSVSTSGYSY |
| SEQ ID NO: 1215 | LC CDR2 (Chothia) | LASNLES |
| SEQ ID NO: 1216 | LC CDR3 (Chothia) | QHSRDLPWT |
| SEQ ID NO: 1214 | LC CDR1 (Combined) | RASKSVSTSGYSYMH |
| SEQ ID NO: 1215 | LC CDR2 (Combined) | LASNLES |
| SEQ ID NO: 1216 | LC CDR3(Combined) | QHSRDLPWT |
| SEQ ID NO: 1218 | VL | DIVLTQSPVSLTVSLGQRATISCRASKSVSTSGYS |
| | | YMHWYQQKPGQPPKLLIYLASNLESGVPARFSG |
| | | SGSGTDFTLNIHPVEEEDAATYYCQHSRDLPWTF |
| | | GGGTKLEIK |
| SEQ ID NO: 1219 | VH | EVQLVESGGGLVKPGGSLKLSCAASGFTFSDYY |
| | | MYWVRQTPEKRLEWVATISGGGSYTYSPDSVKG |
| | | RFTISRDNAKNNLYLQMSSLRSEDTAMYFCARER |
| | | DIYYGNFNAMVYWGRGTSVTVSS |

VH for ZOE (humanized) also referred to as Antibody L-H
Binds to human TCRVβ 4-1, 4-2, 4-3

| | | |
|---|---|---|
| SEQ ID NO: 1220 | VH - 1 | EVQLLESGGGLVQPGGSLRLSCAASGFTFSDYYM |
| | | YWVRQAPGKGLEWVATISGGGSYTYSPDSVKGR |
| | | FTISRDNSKNTLYLQMNSLRAEDTAVYYCARER |
| | | DIYYGNFNAMVYWGRGTLVTVSS |
| SEQ ID NO: 1221 | VH - 2 | EVQLVESGGGLVQPGGSLRLSCAASGFTFSDYY |
| | | MYWVRQAPGKGLEWVATISGGGSYTYSPDSVK |
| | | GRFTISRDNAKNSLYLQMNSLRAEDTAVYYCAR |
| | | ERDIYYGNFNAMVYWGRGTLVTVSS |
| SEQ ID NO: 1222 | VH - 3 | QVQLVESGGGVVQPGRSLRLSCAASGFTFSDYY |
| | | MYWVRQAPGKGLEWVATISGGGSYTYSPDSVK |
| | | GRFTISRDNSKNTLYLQMNSLRAEDTAVYYCAR |
| | | ERDIYYGNFNAMVYWGRGTLVTVSS |
| SEQ ID NO: 1223 | VH - 4 | QVQLVESGGGLVKPGGSLRLSCAASGFTFSDYY |
| | | MYWIRQAPGKGLEWVATISGGGSYTYSPDSVKG |
| | | RFTISRDNAKNSLYLQMNSLRAEDTAVYYCARE |
| | | RDIYYGNFNAMVYWGRGTLVTVSS |

VL for ZOE (humanized) also referred to as Antibody L-H
Binds to human TCRVβ 4-1, 4-2, 4-3

| | | |
|---|---|---|
| SEQ ID NO: 1224 | VL - 1 | EIVLTQSPGTLSLSPGERATLSCRASKSVSTSGYS |
| | | YMHWYQQKPGQAPRLLIYLASNLESGIPDRFSGS |
| | | GSGTDFTLTISRLEPEDFAVYYCQHSRDLPWTFG |
| | | GGTKVEIK |
| SEQ ID NO: 1225 | VL - 2 | EIVLTQSPATLSLSPGERATLSCRASKSVSTSGYS |
| | | YMHWYQQKPGQAPRLLIYLASNLESGIPARFSGS |
| | | GSGTDFTLTISSLEPEDFAVYYCQHSRDLPWTFG |
| | | GGTKVEIK |
| SEQ ID NO: 1226 | VL - 3 | DIQLTQSPSTLSASVGDRVTITCRASKSVSTSGYS |
| | | YMHWYQQKPGKAPKLLIYLASNLESGVPSRFSG |
| | | SGSGTEFTLTISSLQPDDFATYYCQHSRDLPWTFG |
| | | GGTKVEIK |
| SEQ ID NO: 1227 | VL - 4 | AIQLTQSPSSLSASVGDRVTITCRASKSVSTSGYS |
| | | YMHWYQQKPGKAPKLLIYLASNLESGVPSRFSG |
| | | SGSGTDFTLTISSLQPEDFATYYCQHSRDLPWTFG |
| | | GGTKVEIK |

Anti-TCRvb19 (murine), also referred to as BJ1465; or Antibody M
Binds to human TCRVβ 19

| | | |
|---|---|---|
| SEQ ID NO: 1229 | HC CDR1 (Kabat) | GYFWN |
| SEQ ID NO: 1230 | HC CDR2 (Kabat) | YISYDGSNNYNPSLKN |
| SEQ ID NO: 1231 | HC CDR3 (Kabat) | PSPGTGYAVDY |
| SEQ ID NO: 1232 | HC CDR1 (Chothia) | GYSITSGY |
| SEQ ID NO: 1233 | HC CDR2 (Chothia) | SYDGSN |
| SEQ ID NO: 1231 | HC CDR3 (Chothia) | PSPGTGYAVDY |
| SEQ ID NO: 1234 | HC CDR1 (Combined) | GYSITSGYFWN |
| SEQ ID NO: 1230 | HC CDR2 (Combined) | YISYDGSNNYNPSLKN |
| SEQ ID NO: 1231 | HC CDR3(Combined) | PSPGTGYAVDY |
| SEQ ID NO: 1235 | LC CDR1 (Kabat) | RSSQSLVHSNGNTYLH |
| SEQ ID NO: 1236 | LC CDR2 (Kabat) | KVSNRFS |
| SEQ ID NO: 1237 | LC CDR3 (Kabat) | SQSTHVPFT |
| SEQ ID NO: 1238 | LC CDR1 (Chothia) | SQSLVHSNGNTY |
| SEQ ID NO: 1236 | LC CDR2 (Chothia) | KVSNRFS |
| SEQ ID NO: 1237 | LC CDR3 (Chothia) | SQSTHVPFT |
| SEQ ID NO: 1235 | LC CDR1 (Combined) | RSSQSLVHSNGNTYLH |
| SEQ ID NO: 1236 | LC CDR2 (Combined) | KVSNRFS |
| SEQ ID NO: 1237 | LC CDR3(Combined) | SQSTHVPFT |
| SEQ ID NO: 1239 | VL | NVVMTQTPLSLPVSLGDQASISCRSSQSLVHSNG |
| | | NTYLHWYLQKPGQSPKFLIYKVSNRFSGVPDRFS |
| | | GGGSGTEFTLKISRVEAEDLGVYFCSQSTHVPFTF |
| | | GSGTKLEIK |
| SEQ ID NO: 1240 | VH | NVQLQESGPGLVKPSQSLSLTCSVAGYSITSGYF |
| | | WNWIRQFPGNKLEWMGYISYDGSNNYNPSLKN |
| | | RISITRDTSKNQFFLKLNSVTTEDTATYYCASPSP |
| | | GTGYAVDYWGQGTSVTVSS |

VH for Anti-TCRvb19 (humanized) also referred to as Antibody M-H
Binds to human TCRVβ 19

| | | |
|---|---|---|
| SEQ ID NO: 1241 | VH - 1 | QVQLQESGPGLVKPSETLSLTCTVSGYSITSGYF |
| | | WNWIRQPPGKGLEWIGYISYDGSNNYNPSLKNR |
| | | VTISRDTSKNQFSLKLSSVTAADTAVYYCASPSP |
| | | GTGYAVDYWGQGTLVTVSS |
| SEQ ID NO: 1242 | VH - 2 | QVQLQESGPGLVKPSETLSLTCTVSGYSITSGYF |
| | | WNWIRQPPGKGLEWIGYISYDGSNNYNPSLKNR |
| | | VTISRDTSKNQFSLKLSSVTAADTAVYYCASPSP |
| | | GTGYAVDYWGQGTLVTVSS |
| SEQ ID NO: 1243 | VH - 3 | QVQLVESGGGLVQPGGSLRLSCSVSGYSITSGYF |
| | | WNWVRQAPGKGLEWVGYISYDGSNNYNPSLKN |
| | | RFTISRDTSKNTFYLQMNSLRAEDTAVYYCASPS |
| | | PGTGYAVDYWGQGTLVTVSS |

VL for Anti-TCRvb19 (humanized) also referred to as Antibody M-H
Binds to human TCRVβ 19

| | | |
|---|---|---|
| SEQ ID NO: 1244 | VL - 1 | VVMTQSPGTLSLSPGERATLSCRSSQSLVHSNGN |
| | | TYLHWYQQKPGQAPRFLIYKVSNRFSGIPDRFSG |
| | | SGSGTDFTLTISRLEPEDFAVYFCSQSTHVPFTFG |
| | | QGTKLEIK |
| SEQ ID NO: 1245 | VL - 2 | EVVMTQSPATLSLSPGERATLSCRSSQSLVHSNG |
| | | NTYLHWYQQKPGQAPRFLIYKVSNRFSGIPARFS |
| | | GSGSGTDFTLTISSLEPEDFAVYFCSQSTHVPFTFG |
| | | QGTKLEIK |
| SEQ ID NO: 1246 | VL - 3 | EVVMTQSPATLSVSPGERATLSCRSSQSLVHSNG |
| | | NTYLHWYQQKPGQAPRFLIYKVSNRFSGIPARFS |
| | | GSGSGTEFTLTISSLQSEDFAVYFCSQSTHVPFTFG |
| | | QGTKLEIK |
| SEQ ID NO: 1247 | VL - 4 | DVQMTQSPSSLSASVGDRVTITCRSSQSLVHSNG |
| | | NTYLHWYQQKPGKAPKFLIYKVSNRFSGVPSRFS |
| | | GSGSGTDFTFTISSLQPEDIATYFCSQSTHVPFTFG |
| | | QGTKLEIK |

BL37.2 (murine), also referred to as BJ1539 or Antibody N
Binds to human TCRVβ 9

| | | |
|---|---|---|
| SEQ ID NO: 1248 | HC CDR1 (Kabat) | DYIVH |
| SEQ ID NO: 1249 | HC CDR2 (Kabat) | WINTYTGTPTYADDFEG |
| SEQ ID NO: 1250 | HC CDR3 (Kabat) | SWRRGIRGIGFDY |
| SEQ ID NO: 1251 | HC CDR1 (Chothia) | GYTFTDY |
| SEQ ID NO: 1252 | HC CDR2 (Chothia) | NTYTGT |
| SEQ ID NO: 1250 | HC CDR3 (Chothia) | SWRRGIRGIGFDY |
| SEQ ID NO: 1253 | HC CDR1 (Combined) | GYTFTDYIVH |
| SEQ ID NO: 1249 | HC CDR2 (Combined) | WINTYTGTPTYADDFEG |
| SEQ ID NO: 1250 | HC CDR3(Combined) | SWRRGIRGIGFDY |
| SEQ ID NO: 1254 | LC CDR1 (Kabat) | KASKSINKYLA |
| SEQ ID NO: 1255 | LC CDR2 (Kabat) | DGSTLQS |
| SEQ ID NO: 1256 | LC CDR3 (Kabat) | QQHNEYPPT |
| SEQ ID NO: 1257 | LC CDR1 (Chothia) | SKSINKY |
| SEQ ID NO: 1255 | LC CDR2 (Chothia) | DGSTLQS |
| SEQ ID NO: 1256 | LC CDR3 (Chothia) | QQHNEYPPT |
| SEQ ID NO: 1254 | LC CDR1 (Combined) | KASKSINKYLA |
| SEQ ID NO: 1255 | LC CDR2 (Combined) | DGSTLQS |
| SEQ ID NO: 1256 | LC CDR3(Combined) | QQHNEYPPT |
| SEQ ID NO: 1258 | VL | DVQMTQSPYNLAASPGESVSINCKASKSINKYLA |
| | | WYQQKPGKPNKLLIYDGSTLQSGIPSRFSGSGSG |
| | | TDFTLTIRGLEPEDFGLYYCQQHNEYPPTFGAGT |
| | | KLELK |
| SEQ ID NO: 1259 | VH | QLQLVQSGPELREPGESVKISCKASGYTFTDYIVH |
| | | WVKQAPGKGLKWMGWINTYTGTPTYADDFEGR |
| | | FVFSLEASASTANLQISNLKNEDTATYFCARSWR |
| | | RGIRGIGFDYWGQGVMVTVSS |

VH for BL37.2 (humanized) also referred to as Antibody N-H
Binds to human TCRVβ 9

| | | |
|---|---|---|
| SEQ ID NO: 1260 | VH - 1 | QLQLVQSGAEVKKPGASVKVSCKASGYTFTDYI |
| | | VHWVRQAPGQGLEWMGWINTYTGTPTYADDFE |
| | | GWVTMTLDASISTAYMELSRLRSDDTAVYYCAR |
| | | SWRRGIRGIGFDYWGQGTMVTVSS |
| SEQ ID NO: 1261 | VH - 2 | QLQLVQSGAEVKKPGASVKVSCKASGYTFTDYI |
| | | VHWVRQAPGQGLEWMGWINTYTGTPTYADDFE |
| | | GRVTMTLDASTSTAYMELSSLRSEDTAVYYCAR |
| | | SWRRGIRGIGFDYWGQGTMVTVSS |
| SEQ ID NO: 1262 | VH - 3 | QLQLVQSGAEVKKPGASVKVSCKASGYTFTDYI |
| | | VHWVRQAPGQRLEWMGWINTYTGTPTYADDFE |
| | | GRVTITLDASASTAYMELSSLRSEDMAVYYCARS |
| | | WRRGIRGIGFDYWGQGTMVTVSS |
| SEQ ID NO: 1263 | VH - 4 | QLQLVQSGAEVKKPGASVKVSCKASGYTFTDYI |
| | | VHWVRQATGQGLEWMGWINTYTGTPTYADDFE |
| | | GRVTMTLNASISTAYMELSSLRSEDTAVYYCARS |
| | | WRRGIRGIGFDYWGQGTMVTVSS |

VL for BL37.2 (humanized) also referred to as Antibody N-H
Binds to human TCRVβ 9

| | | |
|---|---|---|
| SEQ ID NO: 1264 | VL - 1 | EVVMTQSPGTLSLSPGERATLSCKASKSINKYLA |
| | | WYQQKPGQAPRLLIYDGSTLQSGIPDRFSGSGSG |
| | | TDFTLTISRLEPEDFAVYYCQQHNEYPPTFGQGT |
| | | KLEIK |
| SEQ ID NO: 1265 | VL - 2 | EVVMTQSPATLSLSPGERATLSCKASKSINKYLA |
| | | WYQQKPGQAPRLLIYDGSTLQSGIPARFSGSGSG |
| | | TDFTLTISSLEPEDFAVYYCQQHNEYPPTFGQGTK |
| | | LEIK |
| SEQ ID NO: 1266 | VL - 3 | DVQMTQSPSSLSASVGDRVTITCKASKSINKYLA |
| | | WYQQKPGKAPKLLIYDGSTLQSGVPSRFSGSGSG |
| | | TDFTLTISSLQPEDFATYYCQQHNEYPPTFGQGTK |
| | | LEIK |
| SEQ ID NO: 1267 | VL - 4 | AVRMTQSPSSFSASTGDRVTITCKASKSINKYLA |
| | | WYQQKPGKAPKLLIYDGSTLQSGVPSRFSGSGSG |
| | | TDFTLTISCLQSEDFATYYCQQHNEYPPTFGQGT |
| | | KLEIK |

IG125 (murine) binds to TRVβ 11-2; also referred to as Antibody O

| | | |
|---|---|---|
| SEQ ID NO: 1268 | HC CDR1 (Kabat) | NYGVH |
| SEQ ID NO: 1269 | HC CDR2 (Kabat) | VIWSDGSTDYDTAFIS |
| SEQ ID NO: 1270 | HC CDR3 (Kabat) | RAVVADFDY |
| SEQ ID NO: 1271 | HC CDR1 (Chothia) | GFSLTN |
| SEQ ID NO: 1272 | HC CDR2 (Chothia) | VIWSDGSTD |
| SEQ ID NO: 1270 | HC CDR3 (Chothia) | RAVVADFDY |
| SEQ ID NO: 1273 | HC CDR1 (combined) | GFSLTNYGVH |
| SEQ ID NO: 1269 | HC CDR2 (combined) | VIWSDGSTDYDTAFIS |
| SEQ ID NO: 1270 | HC CDR3 (combined) | RAVVADFDY |
| SEQ ID NO: 1274 | VH | QVQLKQSGPGLLQPSQSLSITCTVSGFSLTNYGV |
| | | HWVRQSPGKGLEWLGVIWSDGSTDYDTAFISRL |
| | | SISKDNSKSQVFFKLNSLQADDTAIYYCARRAVV |
| | | ADFDYWGQGTTLTVSS |
| SEQ ID NO:1275 | LC CDR1 (Kabat) | KASKEVTIFGSISALH |
| SEQ ID NO:1276 | LC CDR2 (Kabat) | NGAKLES |
| SEQ ID NO: 1277 | LC CDR3 (Kabat) | LQNKEVPFT |
| SEQ ID NO:1275 | LC CDR1 (Chothia) | KASKEVTIFGSISALH |
| SEQ ID NO:1276 | LC CDR2 (Chothia) | NGAKLES |
| SEQ ID NO: 1277 | LC CDR3 (Chothia) | LQNKEVPFT |
| SEQ ID NO: 1275 | LC CDR1 (combined) | KASKEVTIFGSISALH |
| SEQ ID NO: 1276 | LC CDR2 (combined) | NGAKLES |
| SEQ ID NO: 1277 | LC CDR3 (combined) | LQNKEVPFT |
| SEQ ID NO: 1278 | VL | DIVLTQSPASLAVSLGQKATISCKASKEVTIFGSI |
| | | SALHWYQQKPGQPPKLIYNGAKLESGVSARFSD |
| | | SGSQNRSPFGNQLSFTLTIAPVEADDAATYYCLQ |
| | | NKEVPFTFGSGTKLEIK |

VL for IG125 (humanized) also referred to as Antibody O-H
binds to TRVβ 11-2

| | | |
|---|---|---|
| SEQ ID NO: 1279 | VL-1 | DIVLTQSPDSLAVSLGERATINCKASKEVTIFGSI |
| | | SALHWYQQKPGQPPKLLYNGAKLESGVSARFG |
| | | VPDRFSRSGSGLDFTLTISSLQAEDVAVYYCLQN |
| | | KEVPFTFGQGTKLEIK |
| SEQ ID NO: 1280 | VL-2 | EIVLTQSPDFQSVTPKEKVTITCKASKEVTIFGSIS |
| | | ALHWYQQKPDQSPKLLYNGAKLESGVSARFGV |
| | | PSRFSRSGSGLDFTLTINSLEAEDAATYYCLQNK |
| | | EVPFTFGQGTKLEIK |
| SEQ ID NO: 1281 | VL-3 | AIQLTQSPSSLSASVGDRVTITCKASKEVTIFGSIS |
| | | ALHWYQQKPGKAPKLLYNGAKLESGVSARFGV |
| | | PSRFSRSGSGLDFTLTISSLQPEDFATYYCLQNKE |
| | | VPFTFGQGTKLEIK |
| SEQ ID NO: 1282 | VL-4 | DIVLTQTPLSLSVTPGQPASISCKASKEVTIFGSIS |
| | | ALHWYLQKPGQPPKLLYNGAKLESGVSARFGV |
| | | PDRFSRSGSGLDFTLKISRVEAEDVGVYYCLQN |
| | | KEVPFTFGQGTKLEIK |

VH for IG125 (humanized) also referred to as Antibody O-H
binds to TRVβ 11-2

| | | |
|---|---|---|
| SEQ ID NO: 1283 | VH-1 | QVTLKESGPVLVKPTETLTLTCTVSGFSLTNYGV |
| | | HWVRQPPGKALEWLGVIWSDGSTDYDTAFISRL |
| | | TISKDNSKSQVVLTMTNMDPVDTATYYCARRA |
| | | VVADFDYWGQGTTVTVSS |
| SEQ ID NO: 1284 | VH-2 | QVQLQESGPGLVKPSGTLSLTCAVSGFSLTNYG |
| | | VHWVRQPPGKGLEWLGVIWSDGSTDYDTAFIS |
| | | RLTISKDNSKSQVSLKLSSVTAADTAVYYCARR |
| | | AVVADFDYWGQGTTVTVSS |
| SEQ ID NO: 1285 | VH-3 | QVQLQQSGPGLVKPSQTLSLTCAVSGFSLTNYG |
| | | VHWVRQSPSRGLEWLGVIWSDGSTDYDTAFISR |
| | | LTINKDNSKSQVSLQLNSVTPEDTAVYYCARRA |
| | | VVADFDYWGQGTTVTVSS |
| SEQ ID NO: 1286 | VH-4 | EVQLVESGGGLVQPGPSLRLSCTVSGFSLTNYG |
| | | VHWVRQAPGKGLEWLGVIWSDGSTDYDTAFIS |
| | | RLTISKDNSKSIVYLQMNSLKTEDTAVYYCARR |
| | | AVVADFDYWGQGTTVTVSS |
| SEQ ID NO: 1287 | VH-5 | EVQLVQSGAEVKKPGESLRISCKVSGFSLTNYG |
| | | VHWVRQMPGKGLEWLGVIWSDGSTDYDTAFIS |
| | | QLTISKDNSISTVYLQWSSLKASDTAMYYCARR |
| | | AVVADFDYWGQGTTVTVSS |

MR5-2 (murine), Binds to mouse TCRVβ 13-2 and 13-3

| | | |
|---|---|---|
| SEQ ID NO: 1376 | SCFV (VH + VL) | QVQLQQSGTELMKPGASVKISCKASGYTFSNY |
| | | WIEWIKQRPGHGLEWVGEILPGAGPTNYNEKFK |
| | | GKATFTADSSSNTAYMQLSSLTSEDSAVYYCAR |
| | | TDYDYDWFAYWGQGTLVTVSAGGGGSGGGGS |
| | | GGGGSGGGGSDIVMSQSPSSLAVSVGEKVTMSC |
| | | KSSQSLLYSGNQKNYLAWYQQKPGQSPKLLIY |
| | | WASTRESGVPDRFTGSGSGTDFTLTINSVKAEDL |
| | | TVYYCQQYYGYPRTFGGGTKVEIK |
| SEQ ID NO: 7500 | HC CDR1 (Kabat) | NYWIE |
| SEQ ID NO: 7501 | HC CDR2 (Kabat) | EILPGAGPTNYNEKFKG |
| SEQ ID NO: 7502 | HC CDR3 (Kabat) | TDYDYDWFAY |
| SEQ ID NO: 7503 | HC CDR1 (Chothia) | GYTFSNY |
| SEQ ID NO: 7504 | HC CDR2 (Chothia) | LPGAGP |
| SEQ ID NO: 7502 | HC CDR3 (Chothia) | TDYDYDWFAY |
| SEQ ID NO: 7505 | HC CDR1 (combined) | GYTFSNYWIE |
| SEQ ID NO: 7501 | HC CDR2 (combined) | EILPGAGPTNYNEKFKG |
| SEQ ID NO: 7502 | HC CDR3 (combined) | TDYDYDWFAY |
| SEQ ID NO: 7506 | LC CDR1 (Kabat) | KSSQSLLYSGNQKNYLA |
| SEQ ID NO: 7507 | LC CDR2 (Kabat) | WASTRES |
| SEQ ID NO: 7508 | LC CDR3 (Kabat) | QQYYGYPRT |
| SEQ ID NO: 7506 | LC CDR1 (Chothia) | KSSQSLLYSGNQKNYLA |
| SEQ ID NO: 7507 | LC CDR2 (Chothia) | WASTRES |
| SEQ ID NO: 7508 | LC CDR3 (Chothia) | QQYYGYPRT |
| SEQ ID NO: 7506 | LC CDR1 (combined) | KSSQSLLYSGNQKNYLA |
| SEQ ID NO: 7507 | LC CDR2 (combined) | WASTRES |
| SEQ ID NO: 7508 | LC CDR3 (combined) | QQYYGYPRT |
| SEQ ID NO: 7509 | VH | QVQLQQSGTELMKPGASVKISCKASGYTFSNY |
| | | WIEWIKQRPGHGLEWVGEILPGAGPTNYNEKFK |
| | | GKATFTADSSSNTAYMQLSSLTSEDSAVYYCAR |
| | | TDYDYDWFAYWGQGTLVTVSA |
| SEQ ID NO: 3527 | VL | DIVMSQSPSSLAVSVGEKVTMSCKSSQSLLYSG |
| | | NQKNYLAWYQQKPGQSPKLLIYWASTRESGVP |
| | | DRFTGSGSGTDFTLTINSVKAEDLTVYYCQQYY |
| | | GYPRTFGGGTKVEIK |
| SEQ ID NO: 7511 | Heavy Chain | QVQLQQSGTELMKPGASVKISCKASGYTFSNY |
| | | WIEWIKQRPGHGLEWVGEILPGAGPTNYNEKFK |
| | | GKATFTADSSSNTAYMQLSSLTSEDSAVYYCAR |
| | | TDYDYDWFAYWGQGTLVTVSAAKTTAPSVYPL |
| | | APVCGDTTGSSVTLGCLVKGYFPEPVTLTWNSG |
| | | SLSSGVHTFPAVLQSDLYTLSSSVTVTSSTWPSQ |
| | | SITCNVAHPASSTKVDKKIEPRGPTIKPCPPCKCP |
| | | APNLLGGPSVFIFPPKIKDVLMISLSPIVTCVVVD |
| | | VSEDDPDVQISWFVNNVEVHTAQTQTHREDYN |
| | | STLRVVSALPIQHQDWMSGKEFKCKVNNKDLP |
| | | APIERTISKPKGSVRAPQVYVLPPPEEEMTKKQV |
| | | TLTCMVTDFMPEDIYVEWTNNGKTELNYKNTE |
| | | PVLDSDGSYFMYSKLRVEKKNWVERNSYSCSV |
| | | VHEGLHNHHTTKSFSRTPGK |
| SEQ ID NO: 7512 | Light Chain | DIVMSQSPSSLAVSVGEKVTMSCKSSQSLLYSG |
| | | NQKNYLAWYQQKPGQSPKLLIYWASTRESGVP |
| | | DRFTGSGSGTDFTLTINSVKAEDLTVYYCQQYY |
| | | GYPRTFGGGTKVEIKRADAAPTVSIFPPSSEQLTS |
| | | GGASVVCFLNNFYPKDINVKWKIDGSERQNGVL |
| | | NSWTDQDSKDSTYSMSSTLTLTKDEYERHNSYT |
| | | CEATHKTSTSPIVKSFNRNECEPEA |

TABLE 14
Exemplary amino acid sequences of TGF-beta polypeptides or TGF-beta receptor
polypeptides

| SEQ ID NO | Description | Amino acid sequence |
|---|---|---|
| SEQ ID | Immature | MPPSGLRLLLLLLPLLWLLVLTPGRPAAGLSTCKTIDMELVKRK |
| NO: 7254 | human TGF- | RIEAIRGQILSKLRLASPPSQGEVPPGPLPEAVLALYNSTRDRVA |
| | beta 1 | GESAEPEPEPEADYYAKEVTRVLMVETHNEIYDKFKQSTHSIYM |
| | (P01137-1) | FFNTSELREAVPEPVLLSRAELRLLRLKLKVEQHVELYQKYSNN |
| | | SWRYLSNRLLAPSDSPEWLSFDVTGVVRQWLSRGGEIEGFRLSA |
| | | HCSCDSRDNTLQVDINGFTTGRRGDLATIHGMNRPFLLLMATPL |
| | | ERAQHLQSSRHRRALDTNYCFSSTEKNCCVRQLYIDFRKDLGW |
| | | KWIHEPKGYHANFCLGPCPYIWSLDTQYSKVLALYNQHNPGAS |
| | | AAPCCVPQALEPLPIVYYVGRKPKVEQLSNMIVRSCKCS |
| SEQ ID | Human TGF- | LSTCKTIDMELVKRKRIEAIRGQILSKLRLASPPSQGEVPPGPLPE |
| NO: 7271 | beta 1 | AVLALYNSTRDRVAGESAEPEPEPEADYYAKEVTRVLMVETHN |
| | (P01137-1) | EIYDKFKQSTHSIYMFFNTSELREAVPEPVLLSRAELRLLRLKLK |
| | | VEQHVELYQKYSNNSWRYLSNRLLAPSDSPEWLSFDVTGVVRQ |
| | | WLSRGGEIEGFRLSAHCSCDSRDNTLQVDINGFTTGRRGDLATI |
| | | HGMNRPFLLLMATPLERAQHLQSSRHRRALDTNYCFSSTEKNC |
| | | CVRQLYIDFRKDLGWKWIHEPKGYHANFCLGPCPYIWSLDTQY |
| | | SKVLALYNQHNPGASAAPCCVPQALEPLPIVYYVGRKPKVEQL |
| | | SNMIVRSCKCS |
| SEQ ID | Immature | MHYCVLSAFLILHLVTVALSLSTCSTLDMDQFMRKRIEAIRGQIL |
| NO: 7255 | human TGF- | SKLKLTSPPEDYPEPEEVPPEVISIYNSTRDLLQEKASRRAAACE |
| | beta 2 | RERSDEEYYAKEVYKIDMPPFFPSENAIPPTFYRPYFRIVRFDVS |
| | (P61812-1) | AMEKNASNLVKAEFRVFRLQNPKARVPEQRIELYQILKSKDLTS |
| | | PTQRYIDSKVVKTRAEGEWLSFDVTDAVHEWLHHKDRNLGFKI |
| | | SLHCPCCTFVPSNNYIIPNKSEELEARFAGIDGTSTYTSGDQKTIK |
| | | STRKKNSGKTPHLLLMLLPSYRLESQQTNRRKKRALDAAYCFR |
| | | NVQDNCCLRPLYIDFKRDLGWKWIHEPKGYNANFCAGACPYL |
| | | WSSDTQHSRVLSLYNTINPEASASPCCVSQDLEPLTILYYIGKTP |
| | | KIEQLSNMIVKSCKCS |
| SEQ ID | Human TGF- | LSTCSTLDMDQFMRKRIEAIRGQILSKLKLTSPPEDYPEPEEVPPE |
| NO: 7272 | beta 2 | VISIYNSTRDLLQEKASRRAAACERERSDEEYYAKEVYKIDMPP |
| | (P61812-1) | FFPSENAIPPTFYRPYFRIVRFDVSAMEKNASNLVKAEFRVFRLQ |
| | | NPKARVPEQRIELYQILKSKDLTSPTQRYIDSKVVKTRAEGEWL |
| | | SFDVTDAVHEWLHHKDRNLGFKISLHCPCCTFVPSNNYIIPNKS |
| | | EELEARFAGIDGTSTYTSGDQKTIKSTRKKNSGKTPHLLLMLLPS |
| | | YRLESQQTNRRKKRALDAAYCFRNVQDNCCLRPLYIDFKRDLG |
| | | WKWIHEPKGYNANFCAGACPYLWSSDTQHSRVLSLYNTINPEA |
| | | SASPCCVSQDLEPLTILYYIGKTPKIEQLSNMIVKSCKCS |
| SEQ ID | Immature | MKMHLQRALVVLALLNFATVSLSLSTCTTLDFGHIKKKRVEAIR |
| NO: 7256 | human TGF- | GQILSKLRLTSPPEPTVMTHVPYQVLALYNSTRELLEEMHGERE |
| | beta 3 | EGCTQENTESEYYAKEIHKFDMIQGLAEHNELAVCPKGITSKVF |
| | (P10600-1) | RFNVSSVEKNRTNLFRAEFRVLRVPNPSSKRNEQRIELFQILRPD |
| | | EHIAKQRYIGGKNLPTRGTAEWLSFDVTDTVREWLLRRESNLG |
| | | LEISIHCPCHTFQPNGDILENIHEVMEIKFKGVDNEDDHGRGDLG |
| | | RLKKQKDHHNPHLILMMIPPHRLDNPGQGGQRKKRALDTNYCF |
| | | RNLEENCCVRPLYIDFRQDLGWKWVHEPKGYYANFCSGPCPYL |
| | | RSADTTHSTVLGLYNTLNPEASASPCCVPQDLEPLTILYYVGRTP |
| | | KVEQLSNMVVKSCKCS |
| SEQ ID | Human TGF- | LSTCTTLDFGHIKKKRVEAIRGQILSKLRLTSPPEPTVMTHVPYQ |
| NO: 7273 | beta 3 | VLALYNSTRELLEEMHGEREEGCTQENTESEYYAKEIHKFDMIQ |
| | (P10600-1) | GLAEHNELAVCPKGITSKVFRFNVSSVEKNRTNLFRAEFRVLRV |
| | | PNPSSKRNEQRIELFQILRPDEHIAKQRYIGGKNLPTRGTAEWLS |
| | | FDVTDTVREWLLRRESNLGLEISIHCPCHTFQPNGDILENIHEVM |
| | | EIKFKGVDNEDDHGRGDLGRLKKQKDHHNPHLILMMIPPHRLD |
| | | NPGQGGQRKKRALDTNYCFRNLEENCCVRPLYIDFRQDLGWK |
| | | WVHEPKGYYANFCSGPCPYLRSADTTHSTVLGLYNTLNPEASA |
| | | SPCCVPQDLEPLTILYYVGRTPKVEQLSNMVVKSCKCS |
| SEQ ID | Immature | MEAAVAAPRPRLLLLVLAAAAAAAAALLPGATALQCFCHLCT |
| NO: 7257 | human | KDNFTCVTDGLCFVSVTETTDKVIHNSMCIAEIDLIPRDRPFVCA |
| | TGFBR1 | PSSKTGSVTTTYCCNQDHCNKIELPTTVKSSPGLGPVELAAVIAG |
| | isoform 1 | PVCFVCISLMLMVYICHNRTVIHHRVPNEEDPSLDRPFISEGTTL |
| | (P36897-1) | KDLIYDMTTSGSGSGLPLLVQRTIARTIVLQESIGKGRFGEVWR |
| | | GKWRGEEVAVKIFSSREERSWFREAEIYQTVMLRHENILGFIAA |
| | | DNKDNGTWTQLWLVSDYHEHGSLFDYLNRYTVTVEGMIKLAL |
| | | STASGLAHLHMEIVGTQGKPAIAHRDLKSKNILVKKNGTCCIAD |
| | | LGLAVRHDSATDTIDIAPNHRVGTKRYMAPEVLDDSINMKHFE |
| | | SFKRADIYAMGLVFWEIARRCSIGGIHEDYQLPYYDLVPSDPSV |
| | | EEMRKVVCEQKLRPNIPNRWQSCEALRVMAKIMRECWYANGA |
| | | ARLTALRIKKTLSQLSQQEGIKM |
| SEQ ID | Human | LQCFCHLCTKDNFTCVTDGLCFVSVTETTDKVIHNSMCIAEIDLI |
| NO: 7274 | TGFBR1 | PRDRPFVCAPSSKTGSVTTTYCCNQDHCNKIELPTTVKSSPGLGP |
| | isoform 1 | VELAAVIAGPVCFVCISLMLMVYICHNRTVIHHRVPNEEDPSLD |
| | (P36897-1) | RPFISEGTTLKDLIYDMTTSGSGSGLPLLVQRTIARTIVLQESIGK |
| | | GRFGEVWRGKWRGEEVAVKIFSSREERSWFREAEIYQTVMLRH |
| | | ENILGFIAADNKDNGTWTQLWLVSDYHEHGSLFDYLNRYTVTV |
| | | EGMIKLALSTASGLAHLHMEIVGTQGKPAIAHRDLKSKNILVKK |
| | | NGTCCIADLGLAVRHDSATDTIDIAPNHRVGTKRYMAPEVLDD |
| | | SINMKHFESFKRADIYAMGLVFWEIARRCSIGGIHEDYQLPYYD |
| | | LVPSDPSVEEMRKVVCEQKLRPNIPNRWQSCEALRVMAKIMRE |
| | | CWYANGAARLTALRIKKTLSQLSQQEGIKM |
| SEQ ID | Immature | MEAAVAAPRPRLLLLVLAAAAAAAAALLPGATALQCFCHLCT |
| NO: 7258 | human | KDNFTCVTDGLCFVSVTETTDKVIHNSMCIAEIDLIPRDRPFVCA |
| | TGFBR1 | PSSKTGSVTTTYCCNQDHCNKIELPTTGPFSVKSSPGLGPVELAA |
| | isoform 2 | VIAGPVCFVCISLMLMVYICHNRTVIHHRVPNEEDPSLDRPFISE |
| | (P36897-2) | GTTLKDLIYDMTTSGSGSGLPLLVQRTIARTIVLQESIGKGRFGE |
| | | VWRGKWRGEEVAVKIFSSREERSWFREAEIYQTVMLRHENILG |
| | | FIAADNKDNGTWTQLWLVSDYHEHGSLFDYLNRYTVTVEGMI |
| | | KLALSTASGLAHLHMEIVGTQGKPAIAHRDLKSKNILVKKNGT |
| | | CCIADLGLAVRHDSATDTIDIAPNHRVGTKRYMAPEVLDDSINM |
| | | KHFESFKRADIYAMGLVFWEIARRCSIGGIHEDYQLPYYDLVPS |
| | | DPSVEEMRKVVCEQKLRPNIPNRWQSCEALRVMAKIMRECWY |
| | | ANGAARLTALRIKKTLSQLSQQEGIKM |
| SEQ ID | Human | LQCFCHLCTKDNFTCVTDGLCFVSVTETTDKVIHNSMCIAEIDLI |
| NO: 7275 | TGFBR1 | PRDRPFVCAPSSKTGSVTTTYCCNQDHCNKIELPTTGPFSVKSSP |
| | isoform 2 | GLGPVELAAVIAGPVCFVCISLMLMVYICHNRTVIHHRVPNEED |
| | (P36897-2) | PSLDRPFISEGTTLKDLIYDMTTSGSGSGLPLLVQRTIARTIVLQE |
| | | SIGKGRFGEVWRGKWRGEEVAVKIFSSREERSWFREAEIYQTV |
| | | MLRHENILGFIAADNKDNGTWTQLWLVSDYHEHGSLFDYLNR |
| | | YTVTVEGMIKLALSTASGLAHLHMEIVGTQGKPAIAHRDLKSK |
| | | NILVKKNGTCCIADLGLAVRHDSATDTIDIAPNHRVGTKRYMAP |
| | | EVLDDSINMKHFESFKRADIYAMGLVFWEIARRCSIGGIHEDYQ |
| | | LPYYDLVPSDPSVEEMRKVVCEQKLRPNIPNRWQSCEALRVMA |
| | | KIMRECWYANGAARLTALRIKKTLSQLSQQEGIKM |
| SEQ ID | Immature | MEAAVAAPRPRLLLLVLAAAAAAAAALLPGATALQCFCHLCT |
| NO: 7259 | human | KDNFTCVTDGLCFVSVTETTDKVIHNSMCIAEIDLIPRDRPFVCA |
| | TGFBR1 | PSSKTGSVTTTYCCNQDHCNKIELPTTGLPLLVQRTIARTIVLQE |
| | isoform 3 | SIGKGRFGEVWRGKWRGEEVAVKIFSSREERSWFREAEIYQTV |
| | (P36897-3) | MLRHENILGFIAADNKDNGTWTQLWLVSDYHEHGSLFDYLNR |
| | | YTVTVEGMIKLALSTASGLAHLHMEIVGTQGKPAIAHRDLKSK |
| | | NILVKKNGTCCIADLGLAVRHDSATDTIDIAPNHRVGTKRYMAP |
| | | EVLDDSINMKHFESFKRADIYAMGLVFWEIARRCSIGGIHEDYQ |
| | | LPYYDLVPSDPSVEEMRKVVCEQKLRPNIPNRWQSCEALRVMA |
| | | KIMRECWYANGAARLTALRIKKTLSQLSQQEGIKM |
| SEQ ID | Human | LQCFCHLCTKDNFTCVTDGLCFVSVTETTDKVIHNSMCIAEIDLI |
| NO: 7276 | TGFBR1 | PRDRPFVCAPSSKTGSVTTTYCCNQDHCNKIELPTTGLPLLVQR |
| | isoform 3 | TIARTIVLQESIGKGRFGEVWRGKWRGEEVAVKIFSSREERSWF |
| | (P36897-3) | REAEIYQTVMLRHENILGFIAADNKDNGTWTQLWLVSDYHEHG |
| | | SLFDYLNRYTVTVEGMIKLALSTASGLAHLHMEIVGTQGKPAIA |
| | | HRDLKSKNILVKKNGTCCIADLGLAVRHDSATDTIDIAPNHRVG |
| | | TKRYMAPEVLDDSINMKHFESFKRADIYAMGLVFWEIARRCSIG |
| | | GIHEDYQLPYYDLVPSDPSVEEMRKVVCEQKLRPNIPNRWQSC |
| | | EALRVMAKIMRECWYANGAARLTALRIKKTLSQLSQQEGIKM |
| SEQ ID | Human | LQCFCHLCTKDNFTCVTDGLCFVSVTETTDKVIHNSMCIAEIDLI |
| NO: 7266 | TGFBR1 | PRDRPFVCAPSSKTGSVTTTYCCNQDHCNKIELPTTVKSSPGLGP |
| | fragment 1 | VEL |
| SEQ ID | Human | ALQCFCHLCTKDNFTCVTDGLCFVSVTETTDKVIHNSMCIAEID |
| NO: 7267 | TGFBR1 | LIPRDRPFVCAPSSKTGSVTTTYCCNQDHCNKIEL |
| | fragment 2 | |
| SEQ ID | Immature | MGRGLLRGLWPLHIVLWTRIASTIPPHVQKSVNNDMIVTDNNG |
| NO: 7260 | human | AVKFPQLCKFCDVRFSTCDNQKSCMSNCSITSICEKPQEVCVAV |
| | TGFBR2 | WRKNDENITLETVCHDPKLPYHDFILEDAASPKCIMKEKKKPGE |
| | isoform B | TFFMCSCSSDECNDNIIFSEEYNTSNPDLLLVIFQVTGISLLPPLG |
| | (short | VAISVIIIFYCYRVNRQQKLSSTWETGKTRKLMEFSEHCAIILED |
| | isoform) | DRSDISSTCANNINHNTELLPIELDTLVGKGRFAEVYKAKLKQN |
| | (P37173-1) | TSEQFETVAVKIFPYEEYASWKTEKDIFSDINLKHENILQFLTAE |
| | | ERKTELGKQYWLITAFHAKGNLQEYLTRHVISWEDLRKLGSSL |
| | | ARGIAHLHSDHTPCGRPKMPIVHRDLKSSNILVKNDLTCCLCDF |
| | | GLSLRLDPTLSVDDLANSGQVGTARYMAPEVLESRMNLENVES |
| | | FKQTDVYSMALVLWEMTSRCNAVGEVKDYEPPFGSKVREHPC |
| | | VESMKDNVLRDRGRPEIPSFWLNHQGIQMVCETLTECWDHDPE |
| | | ARLTAQCVAERFSELEHLDRLSGRSCSEEKIPEDGSLNTTK |
| SEQ ID | Human | TIPPHVQKSVNNDMIVTDNNGAVKFPQLCKFCDVRFSTCDNQK |
| NO: 7277 | TGFBR2 | SCMSNCSITSICEKPQEVCVAVWRKNDENITLETVCHDPKLPYH |
| | isoform B | DFILEDAASPKCIMKEKKKPGETFFMCSCSSDECNDNIIFSEEYN |
| | (short | TSNPDLLLVIFQVTGISLLPPLGVAISVIIIFYCYRVNRQQKLSST |
| | isoform) | WETGKTRKLMEFSEHCAIILEDDRSDISSTCANNINHNTELLPIEL |
| | (P37173-1) | DTLVGKGRFAEVYKAKLKQNTSEQFETVAVKIFPYEEYASWKT |
| | | EKDIFSDINLKHENILQFLTAEERKTELGKQYWLITAFHAKGNL |
| | | QEYLTRHVISWEDLRKLGSSLARGIAHLHSDHTPCGRPKMPIVH |
| | | RDLKSSNILVKNDLTCCLCDFGLSLRLDPTLSVDDLANSGQVGT |
| | | ARYMAPEVLESRMNLENVESFKQTDVYSMALVLWEMTSRCNA |
| | | VGEVKDYEPPFGSKVREHPCVESMKDNVLRDRGRPEIPSFWLN |
| | | HQGIQMVCETLTECWDHDPEARLTAQCVAERFSELEHLDRLSG |
| | | RSCSEEKIPEDGSLNTTK |
| SEQ ID | Immature | MGRGLLRGLWPLHIVLWTRIASTIPPHVQKSDVEMEAQKDEIIC |
| NO: 7261 | human | PSCNRTAHPLRHINNDMIVTDNNGAVKFPQLCKFCDVRFSTCD |
| | TGFBR2 | NQKSCMSNCSITSICEKPQEVCVAVWRKNDENITLETVCHDPKL |
| | isoform A | PYHDFILEDAASPKCIMKEKKKPGETFFMCSCSSDECNDNIIFSE |
| | (long | EYNTSNPDLLLVIFQVTGISLLPPLGVAISVIIIFYCYRVNRQQKLS |
| | isoform) | STWETGKTRKLMEFSEHCAIILEDDRSDISSTCANNINHNTELLPI |
| | (P37173-2) | ELDTLVGKGRFAEVYKAKLKQNTSEQFETVAVKIFPYEEYASW |
| | | KTEKDIFSDINLKHENILQFLTAEERKTELGKQYWLITAFHAKG |
| | | NLQEYLTRHVISWEDLRKLGSSLARGIAHLHSDHTPCGRPKMPI |
| | | VHRDLKSSNILVKNDLTCCLCDFGLSLRLDPTLSVDDLANSGQV |
| | | GTARYMAPEVLESRMNLENVESFKQTDVYSMALVLWEMTSRC |
| | | NAVGEVKDYEPPFGSKVREHPCVESMKDNVLRDRGRPEIPSFW |
| | | LNHQGIQMVCETLTECWDHDPEARLTAQCVAERFSELEHLDRL |
| | | SGRSCSEEKIPEDGSLNTTK |
| SEQ ID | Human | TIPPHVQKSDVEMEAQKDEIICPSCNRTAHPLRHINNDMIVTDN |
| NO: 7278 | TGFBR2 | NGAVKFPQLCKFCDVRFSTCDNQKSCMSNCSITSICEKPQEVCV |
| | isoform A | AVWRKNDENITLETVCHDPKLPYHDFILEDAASPKCIMKEKKKP |
| | (long | GETFFMCSCSSDECNDNIIFSEEYNTSNPDLLLVIFQVTGISLLPPL |
| | isoform) | GVAISVIIIFYCYRVNRQQKLSSTWETGKTRKLMEFSEHCAIILE |
| | (P37173-2) | DDRSDISSTCANNINHNTELLPIELDTLVGKGRFAEVYKAKLKQ |
| | | NTSEQFETVAVKIFPYEEYASWKTEKDIFSDINLKHENILQFLTA |
| | | EERKTELGKQYWLITAFHAKGNLQEYLTRHVISWEDLRKLGSS |
| | | LARGIAHLHSDHTPCGRPKMPIVHRDLKSSNILVKNDLTCCLCD |
| | | FGLSLRLDPTLSVDDLANSGQVGTARYMAPEVLESRMNLENVE |
| | | SFKQTDVYSMALVLWEMTSRCNAVGEVKDYEPPFGSKVREHP |
| | | CVESMKDNVLRDRGRPEIPSFWLNHQGIQMVCETLTECWDHDP |
| | | EARLTAQCVAERFSELEHLDRLSGRSCSEEKIPEDGSLNTTK |
| SEQ ID | Human | TIPPHVQKSVNNDMIVTDNNGAVKFPQLCKFCDVRFSTCDNQK |
| NO: 7262 | TGFBR2 | SCMSNCSITSICEKPQEVCVAVWRKNDENITLETVCHDPKLPYH |
| | fragment 1 | DFILEDAASPKCIMKEKKKPGETFFMCSCSSDECNDNIIFSEEYN |
| | (ECD of | TSNPD |
| | human | |
| | TGFBR2 | |
| | isoform B) | |
| SEQ ID | Human | IPPHVQKSVNNDMIVTDNNGAVKFPQLCKFCDVRFSTCDNQKS |
| NO: 7263 | TGFBR2 | CMSNCSITSICEKPQEVCVAVWRKNDENITLETVCHDPKLPYHD |
| | fragment 2 | FILEDAASPKCIMKEKKKPGETFFMCSCSSDECNDNIIFSEEYNTS |
| | | NPD |
| SEQ ID | Human | TIPPHVQKSDVEMEAQKDEIICPSCNRTAHPLRHINNDMIVTDN |
| NO: 7264 | TGFBR2 | NGAVKFPQLCKFCDVRFSTCDNQKSCMSNCSITSICEKPQEVCV |
| | fragment 3 | AVWRKNDENITLETVCHDPKLPYHDFILEDAASPKCIMKEKKKP |
| | (ECD of | GETFFMCSCSSDECNDNIIFSEEYNTSNPD |
| | human | |
| | TGFBR2 | |
| | isoform A) | |
| SEQ ID | Human | QLCKFCDVRFSTCDNQKSCMSNCSITSICEKPQEVCVAVWRKN |
| NO: 7265 | TGFBR2 | DENITLETVCHDPKLPYHDFILEDAASPKCIMKEKKKPGETFFM |
| | fragment 4 | CSCSSDECNDNIIF |
| SEQ ID | Immature | MTSHYVIAIFALMSSCLATAGPEPGALCELSPVSASHPVQALME |
| NO: 7268 | human | SFTVLSGCASRGTTGLPQEVHVLNLRTAGQGPGQLQREVTLHL |
| | TGFBR3 | NPISSVHIHHKSVVFLLNSPHPLVWHLKTERLATGVSRLFLVSEG |
| | isoform 1 | SVVQFSSANFSLTAETEERNFPHGNEHLLNWARKEYGAVTSFTE |
| | (Q03167-1) | LKIARNIYIKVGEDQVFPPKCNIGKNFLSLNYLAEYLQPKAAEG |
| | | CVMSSQPQNEEVHIIELITPNSNPYSAFQVDITIDIRPSQEDLEVV |
| | | KNLILILKCKKSVNWVIKSFDVKGSLKIIAPNSIGFGKESERSMT |
| | | MTKSIRDDIPSTQGNLVKWALDNGYSPITSYTMAPVANRFHLRL |
| | | ENNAEEMGDEEVHTIPPELRILLDPGALPALQNPPIRGGEGONG |
| | | GLPFPFPDISRRVWNEEGEDGLPRPKDPVIPSIQLFPGLREPEEVQ |
| | | GSVDIALSVKCDNEKMIVAVEKDSFQASGYSGMDVTLLDPTCK |
| | | AKMNGTHFVLESPLNGCGTRPRWSALDGVVYYNSIVIQVPALG |
| | | DSSGWPDGYEDLESGDNGFPGDMDEGDASLFTRPEIVVFNCSL |
| | | QQVRNPSSFQEQPHGNITFNMELYNTDLFLVPSQGVFSVPENGH |
| | | VYVEVSVTKAEQELGFAIQTCFISPYSNPDRMSHYTIIENICPKDE |
| | | SVKFYSPKRVHFPIPQADMDKKRFSFVFKPVFNTSLLFLQCELTL |
| | | CTKMEKHPQKLPKCVPPDEACTSLDASIIWAMMQNKKTFTKPL |
| | | AVIHHEAESKEKGPSMKEPNPISPPIFHGLDTLTVMGIAFAAFVI |
| | | GALLTGALWYIYSHTGETAGRQQVPTSPPASENSSAAHSIGSTQ |
| | | STPCSSSSTA |
| SEQ ID | Human | GPEPGALCELSPVSASHPVQALMESFTVLSGCASRGTTGLPQEV |
| NO: 7279 | TGFBR3 | HVLNLRTAGQGPGQLQREVTLHLNPISSVHIHHKSVVFLLNSPH |
| | isoform 1 | PLVWHLKTERLATGVSRLFLVSEGSVVQFSSANFSLTAETEERN |
| | (Q03167-1) | FPHGNEHLLNWARKEYGAVTSFTELKIARNIYIKVGEDQVFPPK |
| | | CNIGKNFLSLNYLAEYLQPKAAEGCVMSSQPQNEEVHIIELITPN |
| | | SNPYSAFQVDITIDIRPSQEDLEVVKNLILILKCKKSVNWVIKSFD |
| | | VKGSLKIIAPNSIGFGKESERSMTMTKSIRDDIPSTQGNLVKWAL |
| | | DNGYSPITSYTMAPVANRFHLRLENNAEEMGDEEVHTIPPELRI |
| | | LLDPGALPALQNPPIRGGEGQNGGLPFPFPDISRRVWNEEGEDG |
| | | LPRPKDPVIPSIQLFPGLREPEEVQGSVDIALSVKCDNEKMIVAV |
| | | EKDSFQASGYSGMDVTLLDPTCKAKMNGTHFVLESPLNGCGTR |
| | | PRWSALDGVVYYNSIVIQVPALGDSSGWPDGYEDLESGDNGFP |
| | | GDMDEGDASLFTRPEIVVFNCSLQQVRNPSSFQEQPHGNITFNM |
| | | ELYNTDLFLVPSQGVFSVPENGHVYVEVSVTKAEQELGFAIQTC |
| | | FISPYSNPDRMSHYTIIENICPKDESVKFYSPKRVHFPIPQADMDK |
| | | KRFSFVFKPVFNTSLLFLQCELTLCTKMEKHPQKLPKCVPPDEA |
| | | CTSLDASIIWAMMQNKKTFTKPLAVIHHEAESKEKGPSMKEPNP |
| | | ISPPIFHGLDTLTVMGIAFAAFVIGALLTGALWYIYSHTGETAGR |
| | | QQVPTSPPASENSSAAHSIGSTQSTPCSSSSTA |
| SEQ ID | Immature | MTSHYVIAIFALMSSCLATAGPEPGALCELSPVSASHPVQALME |
| NO: 7269 | human | SFTVLSGCASRGTTGLPQEVHVLNLRTAGQGPGQLQREVTLHL |
| | TGFBR3 | NPISSVHIHHKSVVFLLNSPHPLVWHLKTERLATGVSRLFLVSEG |
| | isoform 2 | SVVQFSSANFSLTAETEERNFPHGNEHLLNWARKEYGAVTSFTE |
| | (Q03167-2) | LKIARNIYIKVGEDQVFPPKCNIGKNFLSLNYLAEYLQPKAAEG |
| | | CVMSSQPQNEEVHIIELITPNSNPYSAFQVDITIDIRPSQEDLEVV |
| | | KNLILILKCKKSVNWVIKSFDVKGSLKIIAPNSIGFGKESERSMT |
| | | MTKSIRDDIPSTQGNLVKWALDNGYSPITSYTMAPVANRFHLRL |
| | | ENNEEMGDEEVHTIPPELRILLDPGALPALQNPPIRGGEGQNGGL |
| | | PFPFPDISRRVWNEEGEDGLPRPKDPVIPSIQLFPGLREPEEVQGS |
| | | VDIALSVKCDNEKMIVAVEKDSFQASGYSGMDVTLLDPTCKAK |
| | | MNGTHFVLESPLNGCGTRPRWSALDGVVYYNSIVIQVPALGDS |
| | | SGWPDGYEDLESGDNGFPGDMDEGDASLFTRPEIVVFNCSLQQ |
| | | VRNPSSFQEQPHGNITFNMELYNTDLFLVPSQGVFSVPENGHVY |
| | | VEVSVTKAEQELGFAIQTCFISPYSNPDRMSHYTIIENICPKDESV |
| | | KFYSPKRVHFPIPQADMDKKRFSFVFKPVFNTSLLFLQCELTLCT |
| | | KMEKHPQKLPKCVPPDEACTSLDASIIWAMMQNKKTFTKPLAV |
| | | IHHEAESKEKGPSMKEPNPISPPIFHGLDTLTVMGIAFAAFVIGAL |
| | | LTGALWYIYSHTGETAGRQQVPTSPPASENSSAAHSIGSTQSTPC |
| | | SSSSTA |
| SEQ ID | Human | GPEPGALCELSPVSASHPVQALMESFTVLSGCASRGTTGLPQEV |
| NO: 7280 | TGFBR3 | HVLNLRTAGQGPGQLQREVTLHLNPISSVHIHHKSVVFLLNSPH |
| | isoform 2 | PLVWHLKTERLATGVSRLFLVSEGSVVQFSSANFSLTAETEERN |
| | (Q03167-2) | FPHGNEHLLNWARKEYGAVTSFTELKIARNIYIKVGEDQVFPPK |
| | | CNIGKNFLSLNYLAEYLQPKAAEGCVMSSQPQNEEVHIIELITPN |
| | | SNPYSAFQVDITIDIRPSQEDLEVVKNLILILKCKKSVNWVIKSFD |
| | | VKGSLKIIAPNSIGFGKESERSMTMTKSIRDDIPSTQGNLVKWAL |
| | | DNGYSPITSYTMAPVANRFHLRLENNEEMGDEEVHTIPPELRILL |
| | | DPGALPALQNPPIRGGEGQNGGLPFPFPDISRRVWNEEGEDGLP |
| | | RPKDPVIPSIQLFPGLREPEEVQGSVDIALSVKCDNEKMIVAVEK |
| | | DSFQASGYSGMDVTLLDPTCKAKMNGTHFVLESPLNGCGTRPR |
| | | WSALDGVVYYNSIVIQVPALGDSSGWPDGYEDLESGDNGFPGD |
| | | MDEGDASLFTRPEIVVFNCSLQQVRNPSSFQEQPHGNITFNMEL |
| | | YNTDLFLVPSQGVFSVPENGHVYVEVSVTKAEQELGFAIQTCFI |
| | | SPYSNPDRMSHYTIIENICPKDESVKFYSPKRVHFPIPQADMDKK |
| | | RFSFVFKPVFNTSLLFLQCELTLCTKMEKHPQKLPKCVPPDEAC |
| | | TSLDASIIWAMMQNKKTFTKPLAVIHHEAESKEKGPSMKEPNPI |
| | | SPPIFHGLDTLTVMGIAFAAFVIGALLTGALWYIYSHTGETAGR |
| | | QQVPTSPPASENSSAAHSIGSTQSTPCSSSSTA |
| SEQ ID | Human | GPEPGALCELSPVSASHPVQALMESFTVLSGCASRGTTGLPQEV |
| NO: 7270 | TGFBR3 | HVLNLRTAGQGPGQLQREVTLHLNPISSVHIHHKSVVFLLNSPH |
| | fragment 1 | PLVWHLKTERLATGVSRLFLVSEGSVVQFSSANFSLTAETEERN |
| | | FPHGNEHLLNWARKEYGAVTSFTELKIARNIYIKVGEDQVFPPK |
| | | CNIGKNFLSLNYLAEYLQPKAAEGCVMSSQPQNEEVHIIELITPN |
| | | SNPYSAFQVDITIDIRPSQEDLEVVKNLILILKCKKSVNWVIKSFD |
| | | VKGSLKIIAPNSIGFGKESERSMTMTKSIRDDIPSTQGNLVKWAL |
| | | DNGYSPITSYTMAPVANRFHLRLENNAEEMGDEEVHTIPPELRI |
| | | LLDPGALPALQNPPIRGGEGQNGGLPFPFPDISRRVWNEEGEDG |
| | | LPRPKDPVIPSIQLFPGLREPEEVQGSVDIALSVKCDNEKMIVAV |
| | | EKDSFQASGYSGMDVTLLDPTCKAKMNGTHFVLESPLNGCGTR |
| | | PRWSALDGVVYYNSIVIQVPALGDSSGWPDGYEDLESGDNGFP |
| | | GDMDEGDASLFTRPEIVVFNCSLQQVRNPSSFQEQPHGNITFNM |
| | | ELYNTDLFLVPSQGVFSVPENGHVYVEVSVTKAEQELGFAIQTC |
| | | FISPYSNPDRMSHYTIIENICPKDESVKFYSPKRVHFPIPQADMDK |
| | | KRFSFVFKPVFNTSLLFLQCELTLCTKMEKHPQKLPKCVPPDEA |
| | | CTSLDASIIWAMMQNKKTFTKPLAVIHHEAESKEKGPSMKEPNP |
| | | ISPPIFHGLDTLTV |
| SEQ ID | hCH1- | ASTKGPSVFPLAPSSKSTSGGTAALGCLVKDYFPEPVTVSWNSG |
| NO: 7281 | hFc Hole- | ALTSGVHTFPAVLQSSGLYSLSSVVTVPSSSLGTQTYICNVNHKP |
| | 3x4GS- | SNTKVDKRVEPKSCDKTHTCPPCPAPELLGGPSVFLFPPKPKDTL |
| | TGFbR2 | MISRTPEVTCVVVDVSHEDPEVKFNWYVDGVEVHNAKTKPRE |
| | | EQYNSTYRVVSVLTVLHQDWLNGKEYKCKVSNKALPAPIEKTI |
| | | SKAKGQPREPQVCTLPPSREEMTKNQVSLSCAVKGFYPSDIAVE |
| | | WESNGQPENNYKTTPPVLDSDGSFFLVSKLTVDKSRWQQGNVF |
| | | SCSVMHEALHNHYTQKSLSLSPGXGGGGSGGGGSGGGGSIPPH |
| | | VQKSVNNDMIVTDNNGAVKFPQLCKFCDVRFSTCDNQKSCMS |
| | | NCSITSICEKPQEVCVAVWRKNDENITLETVCHDPKLPYHDFILE |
| | | DAASPKCIMKEKKKPGETFFMCSCSSDECNDNIIFSEEYNTSNPD, |
| | | wherein X is K or absent |
| SEQ ID | hCH1- | ASTKGPSVFPLAPSSKSTSGGTAALGCLVKDYFPEPVTVSWNSG |
| NO: 7282 | hFc Knob- | ALTSGVHTFPAVLQSSGLYSLSSVVTVPSSSLGTQTYICNVNHKP |
| | 3×4GS- | SNTKVDKRVEPKSCDKTHTCPPCPAPELLGGPSVFLFPPKPKDTL |
| | TGFbR2 | MISRTPEVTCVVVDVSHEDPEVKFNWYVDGVEVHNAKTKPRE |
| | | EQYNSTYRVVSVLTVLHQDWLNGKEYKCKVSNKALPAPIEKTI |
| | | SKAKGQPREPQVYTLPPCREEMTKNQVSLWCLVKGFYPSDIAV |
| | | EWESNGQPENNYKTTPPVLDSDGSFFLYSKLTVDKSRWQQGNV |
| | | FSCSVMHEALHNHYTQKSLSLSPGXGGGGSGGGGSGGGGSIPP |
| | | HVQKSVNNDMIVTDNNGAVKFPQLCKFCDVRFSTCDNQKSCM |
| | | SNCSITSICEKPQEVCVAVWRKNDENITLETVCHDPKLPYHDFIL |
| | | EDAASPKCIMKEKKKPGETFFMCSCSSDECNDNIIFSEEYNTSNP |
| | | D, wherein X is K or absent |
| SEQ ID | hFc Hole- | DKTHTCPPCPAPELLGGPSVFLFPPKPKDTLMISRTPEVTCVVVD |
| NO: 7283 | 3×4GS- | VSHEDPEVKFNWYVDGVEVHNAKTKPREEQYNSTYRVVSVLT |
| | TGFbR2 | VLHQDWLNGKEYKCKVSNKALPAPIEKTISKAKGQPREPQVCT |
| | | LPPSREEMTKNQVSLSCAVKGFYPSDIAVEWESNGQPENNYKT |
| | | TPPVLDSDGSFFLVSKLTVDKSRWQQGNVFSCSVMHEALHNHY |
| | | TQKSLSLSPGXGGGGSGGGGSGGGGSIPPHVQKSVNNDMIVTD |
| | | NNGAVKFPQLCKFCDVRFSTCDNQKSCMSNCSITSICEKPQEVC |
| | | VAVWRKNDENITLETVCHDPKLPYHDFILEDAASPKCIMKEKK |
| | | KPGETFFMCSCSSDECNDNIIFSEEYNTSNPD, wherein X is K or |
| | | absent |
| SEQ ID | hFc Knob- | DKTHTCPPCPAPELLGGPSVFLFPPKPKDTLMISRTPEVTCVVVD |
| NO: 7284 | 3×4GS- | VSHEDPEVKFNWYVDGVEVHNAKTKPREEQYNSTYRVVSVLT |
| | TGFbR2 | VLHQDWLNGKEYKCKVSNKALPAPIEKTISKAKGQPREPQVYT |
| | | LPPCREEMTKNQVSLWCLVKGFYPSDIAVEWESNGQPENNYKT |
| | | TPPVLDSDGSFFLYSKLTVDKSRWQQGNVFSCSVMHEALHNHY |
| | | TQKSLSLSPGXGGGGSGGGGSGGGGSIPPHVQKSVNNDMIVTD |
| | | NNGAVKFPQLCKFCDVRFSTCDNQKSCMSNCSITSICEKPQEVC |
| | | VAVWRKNDENITLETVCHDPKLPYHDFILEDAASPKCIMKEKK |
| | | KPGETFFMCSCSSDECNDNIIFSEEYNTSNPD, wherein X is K or |
| | | absent |
| SEQ ID | TGFbR2- | IPPHVQKSVNNDMIVTDNNGAVKFPQLCKFCDVRFSTCDNQKS |
| NO: 7285 | 3×4GS- | CMSNCSITSICEKPQEVCVAVWRKNDENITLETVCHDPKLPYHD |
| | hCH1- | FILEDAASPKCIMKEKKKPGETFFMCSCSSDECNDNIIFSEEYNTS |
| | hFc Hole | NPDGGGGSGGGGSGGGGSASTKGPSVFPLAPSSKSTSGGTAAL |
| | | GCLVKDYFPEPVTVSWNSGALTSGVHTFPAVLQSSGLYSLSSVV |
| | | TVPSSSLGTQTYICNVNHKPSNTKVDKRVEPKSCDKTHTCPPCP |
| | | APELLGGPSVFLFPPKPKDTLMISRTPEVTCVVVDVSHEDPEVKF |
| | | NWYVDGVEVHNAKTKPREEQYNSTYRVVSVLTVLHQDWLNG |
| | | KEYKCKVSNKALPAPIEKTISKAKGQPREPQVCTLPPSREEMTK |
| | | NQVSLSCAVKGFYPSDIAVEWESNGQPENNYKTTPPVLDSDGSF |
| | | FLVSKLTVDKSRWQQGNVFSCSVMHEALHNHYTQKSLSLSPGX, |
| | | wherein X is K or absent |
| SEQ ID | TGFbR2- | IPPHVQKSVNNDMIVTDNNGAVKFPQLCKFCDVRFSTCDNQKS |
| NO: 7286 | 3×4GS- | CMSNCSITSICEKPQEVCVAVWRKNDENITLETVCHDPKLPYHD |
| | hCH1- | FILEDAASPKCIMKEKKKPGETFFMCSCSSDECNDNIIFSEEYNTS |
| | hFc Knob | NPDGGGGSGGGGSGGGGSASTKGPSVFPLAPSSKSTSGGTAAL |
| | | GCLVKDYFPEPVTVSWNSGALTSGVHTFPAVLQSSGLYSLSSVV |
| | | TVPSSSLGTQTYICNVNHKPSNTKVDKRVEPKSCDKTHTCPPCP |
| | | APELLGGPSVFLFPPKPKDTLMISRTPEVTCVVVDVSHEDPEVKF |
| | | NWYVDGVEVHNAKTKPREEQYNSTYRVVSVLTVLHQDWLNG |
| | | KEYKCKVSNKALPAPIEKTISKAKGQPREPQVYTLPPCREEMTK |
| | | NQVSLWCLVKGFYPSDIAVEWESNGQPENNYKTTPPVLDSDGS |
| | | FFLYSKLTVDKSRWQQGNVFSCSVMHEALHNHYTQKSLSLSPG |
| | | X, wherein X is K or absent |
| SEQ ID | TGFbR2- | IPPHVQKSVNNDMIVTDNNGAVKFPQLCKFCDVRFSTCDNQKS |
| NO: 7287 | 3x4GS- | CMSNCSITSICEKPQEVCVAVWRKNDENITLETVCHDPKLPYHD |
| | hCLIg_vl | FILEDAASPKCIMKEKKKPGETFFMCSCSSDECNDNIIFSEEYNTS |
| | | NPDGGGGSGGGGSGGGGSGQPKANPTVTLFPPSSEELQANKAT |
| | | LVCLISDFYPGAVTVAWKADGSPVKAGVETTKPSKQSNNKYAA |
| | | SSYLSLTPEQWKSHRSYSCQVTHEGSTVEKTVAPTECS |
| SEQ ID | TGFBR2- | IPPHVQKSVNNDMIVTDNNGAVKFPQLCKFCDVRFSTCDNQKS |
| NO: 7288 | 3x4GS- | CMSNCSITSICEKPQEVCVAVWRKNDENITLETVCHDPKLPYHD |
| | hCLIg_vk | FILEDAASPKCIMKEKKKPGETFFMCSCSSDECNDNIIFSEEYNTS |
| | | NPDGGGGSGGGGSGGGGSRTVAAPSVFIFPPSDEQLKSGTASVV |
| | | CLLNNFYPREAKVQWKVDNALQSGNSQESVTEQDSKDSTYSLS |
| | | STLTLSKADYEKHKVYACEVTHQGLSSPVTKSFNRGEC |

TABLE 15
Exemplary construct sequences
Construct 1

| | | | |
|---|---|---|---|
| Chain 1 | 3529 | Full Sequence | QVQLQQSGTELMKPGASVKISCKASGYTFSNYWIEWIKQRP |
| (heavy | | | GHGLEWVGEILPGAGPTNYNEKFKGKATFTADSSSNTAYM |
| chain) | | | QLSSLTSEDSAVYYCARTDYDYDWFAYWGQGTLVTVSAA |
| | | | KTTAPSVYPLAPVSGDTTGSSVTLGCLVKGYFPEPVTLTWN |
| | | | SGSLSSGVHTFPAVLQSDLYTLSSSVTVTSSTWPSQSITCNV |
| | | | AHPASSTKVDKKIEPKSCDKTHTCPPCPAPNAAGGPSVFIFP |
| | | | PKIKDVLMISLSPIVTCVVVDVSEDDPDVQISWFVNNVEVHT |
| | | | AQTQTHREDYNSTLRVVSALPIQHQDWMSGKEFKCKVNNK |
| | | | DLGAPIERTISKPKGSVRAPQVCVLPPPEEEMTKKQVTLSCA |
| | | | VTDFMPEDIYVEWTNNGKTELNYKNTEPVLDSDGSYFMVS |
| | | | KLRVEKKNWVERNSYSCSVVHEGLHNHHTTKSFSRTPGKE |
| | | | PEA |
| | 3548 | Full Sequence | QVQLQQSGTELMKPGASVKISCKASGYTFSNYWIEWIKQRP |
| | | without tag | GHGLEWVGEILPGAGPTNYNEKFKGKATFTADSSSNTAYM |
| | | | QLSSLTSEDSAVYYCARTDYDYDWFAYWGQGTLVTVSAA |
| | | | KTTAPSVYPLAPVSGDTTGSSVTLGCLVKGYFPEPVTLTWN |
| | | | SGSLSSGVHTFPAVLQSDLYTLSSSVTVTSSTWPSQSITCNV |
| | | | AHPASSTKVDKKIEPKSCDKTHTCPPCPAPNAAGGPSVFIFP |
| | | | PKIKDVLMISLSPIVTCVVVDVSEDDPDVQISWFVNNVEVHT |
| | | | AQTQTHREDYNSTLRVVSALPIQHQDWMSGKEFKCKVNNK |
| | | | DLGAPIERTISKPKGSVRAPQVCVLPPPEEEMTKKQVTLSCA |
| | | | VTDFMPEDIYVEWTNNGKTELNYKNTEPVLDSDGSYFMVS |
| | | | KLRVEKKNWVERNSYSCSVVHEGLHNHHTTKSFSRTPGK |
| | 3530 | anti-TCRvβ | QVQLQQSGTELMKPGASVKISCKASGYTFSNYWIEWIKQRP |
| | | VH | GHGLEWVGEILPGAGPTNYNEKFKGKATFTADSSSNTAYM |
| | | from murine | QLSSLTSEDSAVYYCARTDYDYDWFAYWGQGTLVTVSAA |
| | | MR5-2 | KTTAPSVYPLAPVSGDTTGSSVTLGCLVKGYFPEPVTLTWN |
| | | | SGSLSSGVHTFPAVLQSDLYTLSSSVTVTSS |
| | 3531 | mouse Fc | TWPSQSITCNVAHPASSTKVDKKIEPKSCDKTHTCPPCPAPN |
| | | heavy chain | AAGGPSVFIFPPKIKDVLMISLSPIVTCVVVDVSEDDPDVQIS |
| | | comprising | WFVNNVEVHTAQTQTHREDYNSTLRVVSALPIQHQDWMS |
| | | LALAPG | GKEFKCKVNNKDLGAPIERTISKPKGSVRAPQVCVLPPPEEE |
| | | mutations | MTKKQVTLSCAVTDFMPEDIYVEWTNNGKTELNYKNTEPV |
| | | (L234A L235A | LDSDGSYFMVSKLRVEKKNWVERNSYSCSVVHEGLHNHH |
| | | and P329G) | TTKSFSRTPGK |
| | 3547 | Tag | EPEA |
| Chain 2 | 3532 | Full Sequence | APTSSSTKKTQLQLEHLLLDLQMILNGINNYKNPKLTRMLT |
| (IL2-Fc) | | | FKFYMPKKATELKHLQCLEEELKPLEEVLNLAQSKNFHLRP |
| | | | RDLISNINVIVLELKGSETTFMCEYADETATIVEFLNRWITFC |
| | | | QSIISTLTGGGGSGGGGSDKTHTCPPCPAPNAAGGPSVFIFPP |
| | | | KIKDVLMISLSPIVTCVVVDVSEDDPDVQISWFVNNVEVHT |
| | | | AQTQTHREDYNSTLRVVSALPIQHQDWMSGKEFKCKVNNK |
| | | | DLGAPIERTISKPKGSVRAPQVYVLPPCEEEMTKKQVTLWC |
| | | | MVTDFMPEDIYVEWTNNGKTELNYKNTEPVLDSDGSYFMY |
| | | | SKLRVEKKNWVERNSYSCSVVHEGLHNHHTTKSFSRTPGK |
| | | | GGGGSHHHHHHHH |
| | 3549 | Full Sequence | APTSSSTKKTQLQLEHLLLDLQMILNGINNYKNPKLTRMLT |
| | | without tag | FKFYMPKKATELKHLQCLEEELKPLEEVLNLAQSKNFHLRP |
| | | | RDLISNINVIVLELKGSETTFMCEYADETATIVEFLNRWITFC |
| | | | QSIISTLTGGGGSGGGGSDKTHTCPPCPAPNAAGGPSVFIFPP |
| | | | KIKDVLMISLSPIVTCVVVDVSEDDPDVQISWFVNNVEVHT |
| | | | AQTQTHREDYNSTLRVVSALPIQHQDWMSGKEFKCKVNNK |
| | | | DLGAPIERTISKPKGSVRAPQVYVLPPCEEEMTKKQVTLWC |
| | | | MVTDFMPEDIYVEWTNNGKTELNYKNTEPVLDSDGSYFMY |
| | | | SKLRVEKKNWVERNSYSCSVVHEGLHNHHTTKSFSRTPGK |
| | 2191 | IL-2 | APTSSSTKKTQLQLEHLLLDLQMILNGINNYKNPKLTRMLT |
| | | | FKFYMPKKATELKHLQCLEEELKPLEEVLNLAQSKNFHLRP |
| | | | RDLISNINVIVLELKGSETTFMCEYADETATIVEFLNRWITFC |
| | | | QSIISTLT |
| | 3308 | linker | GGGGSGGGGS |
| | 3533 | mouse Fc | DKTHTCPPCPAPNAAGGPSVFIFPPKIKDVLMISLSPIVTCVV |
| | | heavy chain | VDVSEDDPDVQISWFVNNVEVHTAQTQTHREDYNSTLRVV |
| | | comprising | SALPIQHQDWMSGKEFKCKVNNKDLGAPIERTISKPKGSVR |
| | | LALAPG | APQVYVLPPCEEEMTKKQVTLWCMVTDFMPEDIYVEWTN |
| | | mutations | NGKTELNYKNTEPVLDSDGSYFMYSKLRVEKKNWVERNS |
| | | (L234A L235A | YSCSVVHEGLHNHHTTKSFSRTPGK |
| | | and P329G) | |
| | 3534 | Tag | GGGGSHHHHHHHH |
| Chain 3 | 3526 | Full Sequence | DIVMSQSPSSLAVSVGEKVTMSCKSSQSLLYSGNQKNYLA |
| (light chain) | | | WYQQKPGQSPKLLIYWASTRESGVPDRFTGSGSGTDFTLTI |
| | | | NSVKAEDLTVYYCQQYYGYPRTFGGGTKVEIKRADAAPTV |
| | | | SIFPPSSEQLTSGGASVVCFLNNFYPKDINVKWKIDGSERQN |
| | | | GVLNSWTDQDSKDSTYSMSSTLTLTKDEYERHNSYTCEAT |
| | | | HKTSTSPIVKSFNRNEC |
| | 3527 | anti-TCRvß | DIVMSQSPSSLAVSVGEKVTMSCKSSQSLLYSGNQKNYLA |
| | | VL | WYQQKPGQSPKLLIYWASTRESGVPDRFTGSGSGTDFTLTI |
| | | from murine | NSVKAEDLTVYYCQQYYGYPRTFGGGTKVEIK |
| | | MR5-2 | |
| | 3528 | Immunoglobulin | RADAAPTVSIFPPSSEQLTSGGASVVCFLNNFYPKDINVKWK |
| | | constant | IDGSERQNGVLNSWTDQDSKDSTYSMSSTLTLTKDEYERHN |
| | | region | SYTCEATHKTSTSPIVKSFNRNEC |

Construct 2

| | | | |
|---|---|---|---|
| Chain 1 | 3536 | Full Sequence | QVQLQQSGTELMKPGASVKISCKASGYTFSNYWIEWIKQRP |
| (heavy | | | GHGLEWVGEILPGAGPTNYNEKFKGKATFTADSSSNTAYM |
| chain) | | | QLSSLTSEDSAVYYCARTDYDYDWFAYWGQGTLVTVSAA |
| | | | KTTAPSVYPLAPVSGDTTGSSVTLGCLVKGYFPEPVTLTWN |
| | | | SGSLSSGVHTFPAVLQSDLYTLSSSVTVTSSTWPSQSITCNV |
| | | | AHPASSTKVDKKIEPKSCDKTHTCPPCPAPNAAGGPSVFIFP |
| | | | PKIKDVLMISLSPIVTCVVVDVSEDDPDVQISWFVNNVEVHT |
| | | | AQTQTHREDYNSTLRVVSALPIQHQDWMSGKEFKCKVNNK |
| | | | DLGAPIERTISKPKGSVRAPQVYVLPPPEEEMTKKQVTLTC |
| | | | MVTDFMPEDIYVEWTNNGKTELNYKNTEPVLDSDGSYFMY |
| | | | SKLRVEKKNWVERNSYSCSVVHEGLHNHHTTKSFSRTPGK |
| | | | EPEA |
| | 3530 | anti-TCRvβ | QVQLQQSGTELMKPGASVKISCKASGYTFSNYWIEWIKQRP |
| | | VH | GHGLEWVGEILPGAGPTNYNEKFKGKATFTADSSSNTAYM |
| | | from murine | QLSSLTSEDSAVYYCARTDYDYDWFAYWGQGTLVTVSAA |
| | | MR5-2 | KTTAPSVYPLAPVSGDTTGSSVTLGCLVKGYFPEPVTLTWN |
| | | | SGSLSSGVHTFPAVLQSDLYTLSSSVTVTSS |
| | 3537 | mouse Fc | TWPSQSITCNVAHPASSTKVDKKIEPKSCDKTHTCPPCPAPN |
| | | heavy chain | AAGGPSVFIFPPKIKDVLMISLSPIVTCVVVDVSEDDPDVQIS |
| | | comprising | WFVNNVEVHTAQTQTHREDYNSTLRVVSALPIQHQDWMS |
| | | LALAPG | GKEFKCKVNNKDLGAPIERTISKPKGSVRAPQVYVLPPPEEE |
| | | mutations | MTKKQVTLTCMVTDFMPEDIYVEWTNNGKTELNYKNTEP |
| | | (L234A L235A | VLDSDGSYFMYSKLRVEKKNWVERNSYSCSVVHEGLHNH |
| | | and P329G) | HTTKSFSRTPGKEPEA |
| Chain 2 | 3535 | Full Sequence | DIVMSQSPSSLAVSVGEKVTMSCKSSQSLLYSGNQKNYLA |
| (light chain- | | | WYQQKPGQSPKLLIYWASTRESGVPDRFTGSGSGTDFTLTI |
| IL2) | | | NSVKAEDLTVYYCQQYYGYPRTFGGGTKVEIKRADAAPTV |
| | | | SIFPPSSEQLTSGGASVVCFLNNFYPKDINVKWKIDGSERQN |
| | | | GVLNSWTDQDSKDSTYSMSSTLTLTKDEYERHNSYTCEAT |
| | | | HKTSTSPIVKSFNRNECGGGGSGGGGSGGGGSAPTSSSTKK |
| | | | TQLQLEHLLLDLQMILNGINNYKNPKLTRMLTFKFYMPKK |
| | | | ATELKHLQCLEEELKPLEEVLNLAQSKNFHLRPRDLISNINVI |
| | | | VLELKGSETTFMCEYADETATIVEFLNRWITFCQSIISTLT |
| | 3527 | anti-TCRvβ | DIVMSQSPSSLAVSVGEKVTMSCKSSQSLLYSGNQKNYLA |
| | | VL | WYQQKPGQSPKLLIYWASTRESGVPDRFTGSGSGTDFTLTI |
| | | from murine | NSVKAEDLTVYYCQQYYGYPRTFGGGTKVEIK |
| | | MR5-2 | |
| | 3528 | Immunoglobulin | RADAAPTVSIFPPSSEQLTSGGASVVCFLNNFYPKDINVKWK |
| | | constant | IDGSERQNGVLNSWTDQDSKDSTYSMSSTLTLTKDEYERHN |
| | | region | SYTCEATHKTSTSPIVKSFNRNEC |
| | 3309 | linker | GGGGSGGGGSGGGGS |
| | 2191 | IL-2 | APTSSSTKKTQLQLEHLLLDLQMILNGINNYKNPKLTRMLT |
| | | | FKFYMPKKATELKHLQCLEEELKPLEEVLNLAQSKNFHLRP |
| | | | RDLISNINVIVLELKGSETTFMCEYADETATIVEFLNRWITFC |
| | | | QSIISTLT |

Humanized Molecule 1

| | | | |
|---|---|---|---|
| Chain 1 | 3517 | Full Sequence | QVQLVQSGAEVKKPGSSVKVSCKASGHDFRLTYIHWVRQA |
| (heavy | | | PGQGLEWMGRVSAGSGNVKYNEKFKGRVTITADTSTSTAY |
| chain) | | | MELSSLRSEDTAVYYCAVSYYSYDVLDYWGQGTTVTVSSA |
| | | | STKGPSVFPLAPSSKSTSGGTAALGCLVKDYFPEPVTVSWN |
| | | | SGALTSGVHTFPAVLQSSGLYSLSSVVTVPSSSLGTQTYICN |
| | | | VNHKPSNTKVDKRVEPKSCDKTHTCPPCPAPELLGGPSVFL |
| | | | FPPKPKDTLMISRTPEVTCVVVDVSHEDPEVKFNWYVDGV |
| | | | EVHNAKTKPREEQYASTYRVVSVLTVLHQDWLNGKEYKC |
| | | | KVSNKALPAPIEKTISKAKGQPREPQVCTLPPSREEMTKNQV |
| | | | SLSCAVKGFYPSDIAVEWESNGQPENNYKTTPPVLDSDGSF |
| | | | FLVSKLTVDKSRWQQGNVFSCSVMHEALHNHYTQKSLSLS |
| | | | PGK |
| | 1346 | anti-TCRvβ | QVQLVQSGAEVKKPGSSVKVSCKASGHDFRLTYIHWVRQA |
| | | VH | PGQGLEWMGRVSAGSGNVKYNEKFKGRVTITADTSTSTAY |
| | | | MELSSLRSEDTAVYYCAVSYYSYDVLDYWGQGTTVTVSS |
| | 3649 | Human IgG1 | ASTKGPSVFPLAPSSKSTSGGTAALGCLVKDYFPEPVTVSW |
| | | hole cys | NSGALTSGVHTFPAVLQSSGLYSLSSVVTVPSSSLGTQTYIC |
| | | N297A | NVNHKPSNTKVDKRVEPKSCDKTHTCPPCPAPELLGGPSVF |
| | | | LFPPKPKDTLMISRTPEVTCVVVDVSHEDPEVKFNWYVDG |
| | | | VEVHNAKTKPREEQYASTYRVVSVLTVLHQDWLNGKEYK |
| | | | CKVSNKALPAPIEKTISKAKGQPREPQVCTLPPSREEMTKNQ |
| | | | VSLSCAVKGFYPSDIAVEWESNGQPENNYKTTPPVLDSDGS |
| | | | FFLVSKLTVDKSRWQQGNVFSCSVMHEALHNHYTQKSLSL |
| | | | SPGK |
| Chain 2 | 3521 | Full Sequence | APTSSSTKKTQLQLEHLLLDLQMILNGINNYKNPKLTRMLT |
| (IL2-Fc) | | | FKFYMPKKATELKHLQCLEEELKPLEEVLNLAQSKNFHLRP |
| | | | RDLISNINVIVLELKGSETTFMCEYADETATIVEFLNRWITFA |
| | | | QSIISTLTGGGGSGGGGSDKTHTCPPCPAPELLGGPSVFLFPP |
| | | | KPKDTLMISRTPEVTCVVVDVSHEDPEVKFNWYVDGVEVH |
| | | | NAKTKPREEQYASTYRVVSVLTVLHQDWLNGKEYKCKVS |
| | | | NKALPAPIEKTISKAKGQPREPQVYTLPPCREEMTKNQVSL |
| | | | WCLVKGFYPSDIAVEWESNGQPENNYKTTPPVLDSDGSFFL |
| | | | YSKLTVDKSRWQQGNVFSCSVMHEALHNHYTQKSLSLSPG |
| | | | K |
| | 2270 | IL-2 C125A | APTSSSTKKTQLQLEHLLLDLQMILNGINNYKNPKLTRMLT |
| | | | FKFYMPKKATELKHLQCLEEELKPLEEVLNLAQSKNFHLRP |
| | | | RDLISNINVIVLELKGSETTFMCEYADETATIVEFLNRWITFA |
| | | | QSIISTLT |
| | 3308 | linker | GGGGSGGGGS |
| | 3648 | Human Fc | DKTHTCPPCPAPELLGGPSVFLFPPKPKDTLMISRTPEVTCV |
| | | Knob cys | VVDVSHEDPEVKFNWYVDGVEVHNAKTKPREEQYASTYR |
| | | N297A | VVSVLTVLHQDWLNGKEYKCKVSNKALPAPIEKTISKAKG |
| | | | QPREPQVYTLPPCREEMTKNQVSLWCLVKGFYPSDIAVEW |
| | | | ESNGQPENNYKTTPPVLDSDGSFFLYSKLTVDKSRWQQGN |
| | | | VFSCSVMHEALHNHYTQKSLSLSPGK |
| Chain 3 | 3518 | Full Sequence | DIQMTQSPSFLSASVGDRVTITCKASQNVADRVVWHQQKP |
| (light chain) | | | GKAPKALIYSSSHRYKGVPSRFSGSGSGTEFTLTISSLQPEDF |
| | | | ATYFCQQFKSYPLTFGQGTKLEIKRTVAAPSVFIFPPSDEQL |
| | | | KSGTASVVCLLNNFYPREAKVQWKVDNALQSGNSQESVTE |
| | | | QDSKDSTYSLSSTLTLSKADYEKHKVYACEVTHQGLSSPVT |
| | | | KSFNRGEC |
| | 1349 | anti-TCRvß | DIQMTQSPSFLSASVGDRVTITCKASQNVADRVVWHQQKP |
| | | VL | GKAPKALIYSSSHRYKGVPSRFSGSGSGTEFTLTISSLQPEDF |
| | | | ATYFCQQFKSYPLTFGQGTKLEIK |
| | 3644 | Immunoglobulin | RTVAAPSVFIFPPSDEQLKSGTASVVCLLNNFYPREAKVQW |
| | | kappa | KVDNALQSGNSQESVTEQDSKDSTYSLSSTLTLSKADYEKH |
| | | constant C | KVYACEVTHQGLSSPVTKSFNRGEC |
| | | region | |

Humanized Molecule 2

| | | | |
|---|---|---|---|
| Chain 1 | 4000 | Full Sequence | QVQLVQSGAEVKKPGSSVKVSCKASGHDFRLTYIHWVRQA |
| (heavy | | | PGQGLEWMGRVSAGSGNVKYNEKFKGRVTITADTSTSTAY |
| chain) | | | MELSSLRSEDTAVYYCAVSYYSYDVLDYWGQGTTVTVSSA |
| | | | STKGPSVFPLAPSSKSTSGGTAALGCLVKDYFPEPVTVSWN |
| | | | SGALTSGVHTFPAVLQSSGLYSLSSVVTVPSSSLGTQTYICN |
| | | | VNHKPSNTKVDKRVEPKSCDKTHTCPPCPAPELLGGPSVFL |
| | | | FPPKPKDTLMISRTPEVTCVVVDVSHEDPEVKFNWYVDGV |
| | | | EVHNAKTKPREEQYASTYRVVSVLTVLHQDWLNGKEYKC |
| | | | KVSNKALPAPIEKTISKAKGQPREPQVCTLPPSREEMTKNQV |
| | | | SLSCAVKGFYPSDIAVEWESNGQPENNYKTTPPVLDSDGSF |
| | | | FLVSKLTVDKSRWQQGNVFSCSVMHEALHNHYTQKSLSLS |
| | | | P |
| | 1346 | anti-TCRvβ | QVQLVQSGAEVKKPGSSVKVSCKASGHDFRLTYIHWVRQA |
| | | VH | PGQGLEWMGRVSAGSGNVKYNEKFKGRVTITADTSTSTAY |
| | | | MELSSLRSEDTAVYYCAVSYYSYDVLDYWGQGTTVTVSS |
| | 4001 | Human IgG1 | ASTKGPSVFPLAPSSKSTSGGTAALGCLVKDYFPEPVTVSW |
| | | hole cys | NSGALTSGVHTFPAVLQSSGLYSLSSVVTVPSSSLGTQTYIC |
| | | N297A | NVNHKPSNTKVDKRVEPKSCDKTHTCPPCPAPELLGGPSVF |
| | | | LFPPKPKDTLMISRTPEVTCVVVDVSHEDPEVKFNWYVDG |
| | | | VEVHNAKTKPREEQYASTYRVVSVLTVLHQDWLNGKEYK |
| | | | CKVSNKALPAPIEKTISKAKGQPREPQVCTLPPSREEMTKNQ |
| | | | VSLSCAVKGFYPSDIAVEWESNGQPENNYKTTPPVLDSDGS |
| | | | FFLVSKLTVDKSRWQQGNVFSCSVMHEALHNHYTQKSLSL |
| | | | SP |
| Chain 2 | 4002 | Full Sequence | APTSSSTKKTQLQLEHLLLDLQMILNGINNYKNPKLTRMLT |
| (IL2-Fc) | | | FKFYMPKKATELKHLQCLEEELKPLEEVLNLAQSKNFHLRP |
| | | | RDLISNINVIVLELKGSETTFMCEYADETATIVEFLNRWITFA |
| | | | QSIISTLTGGGGSGGGGSDKTHTCPPCPAPELLGGPSVFLFPP |
| | | | KPKDTLMISRTPEVTCVVVDVSHEDPEVKFNWYVDGVEVH |
| | | | NAKTKPREEQYASTYRVVSVLTVLHQDWLNGKEYKCKVS |
| | | | NKALPAPIEKTISKAKGQPREPQVYTLPPCREEMTKNQVSL |
| | | | WCLVKGFYPSDIAVEWESNGQPENNYKTTPPVLDSDGSFFL |
| | | | YSKLTVDKSRWQQGNVFSCSVMHEALHNHYTQKSLSLSP |
| | 2270 | IL-2 C125A | APTSSSTKKTQLQLEHLLLDLQMILNGINNYKNPKLTRMLT |
| | | | FKFYMPKKATELKHLQCLEEELKPLEEVLNLAQSKNFHLRP |
| | | | RDLISNINVIVLELKGSETTFMCEYADETATIVEFLNRWITFA |
| | | | QSIISTLT |
| | 3308 | linker | GGGGSGGGGS |
| | 4003 | Human Fc | DKTHTCPPCPAPELLGGPSVFLFPPKPKDTLMISRTPEVTCV |
| | | Knob cys | VVDVSHEDPEVKFNWYVDGVEVHNAKTKPREEQYASTYR |
| | | N297A | VVSVLTVLHQDWLNGKEYKCKVSNKALPAPIEKTISKAKG |
| | | | QPREPQVYTLPPCREEMTKNQVSLWCLVKGFYPSDIAVEW |
| | | | ESNGQPENNYKTTPPVLDSDGSFFLYSKLTVDKSRWQQGN |
| | | | VFSCSVMHEALHNHYTQKSLSLSP |
| Chain 3 | 3518 | Full Sequence | DIQMTQSPSFLSASVGDRVTITCKASQNVADRVVWHQQKP |
| (light chain) | | | GKAPKALIYSSSHRYKGVPSRFSGSGSGTEFTLTISSLQPEDF |
| | | | ATYFCQQFKSYPLTFGQGTKLEIKRTVAAPSVFIFPPSDEQL |
| | | | KSGTASVVCLLNNFYPREAKVQWKVDNALQSGNSQESVTE |
| | | | QDSKDSTYSLSSTLTLSKADYEKHKVYACEVTHQGLSSPVT |
| | | | KSFNRGEC |
| | 1349 | anti-TCRvß | DIQMTQSPSFLSASVGDRVTITCKASQNVADRVVWHQQKP |
| | | VL | GKAPKALIYSSSHRYKGVPSRFSGSGSGTEFTLTISSLQPEDF |
| | | | ATYFCQQFKSYPLTFGQGTKLEIK |
| | 3644 | Immunoglobulin | RTVAAPSVFIFPPSDEQLKSGTASVVCLLNNFYPREAKVQW |
| | | kappa | KVDNALQSGNSQESVTEQDSKDSTYSLSSTLTLSKADYEKH |
| | | constant C | KVYACEVTHQGLSSPVTKSFNRGEC |
| | | region | |

Humanized Molecule 3

| | | | |
|---|---|---|---|
| Chain 1 | 4004 | Full Sequence | QVQLVQSGAEVKKPGSSVKVSCKASGYSFTTYYIHWVRQA |
| (heavy | | | PGQGLEWMGWFFPGSGNIKYNEKFKGRVTITADTSTSTAY |
| chain) | | | MELSSLRSEDTAVYYCAGSYYSYDVLDYWGQGTTVTVSSA |
| | | | STKGPSVFPLAPSSKSTSGGTAALGCLVKDYFPEPVTVSWN |
| | | | SGALTSGVHTFPAVLQSSGLYSLSSVVTVPSSSLGTQTYICN |
| | | | VNHKPSNTKVDKRVEPKSCDKTHTCPPCPAPELLGGPSVFL |
| | | | FPPKPKDTLMISRTPEVTCVVVDVSHEDPEVKFNWYVDGV |
| | | | EVHNAKTKPREEQYASTYRVVSVLTVLHQDWLNGKEYKC |
| | | | KVSNKALPAPIEKTISKAKGQPREPQVCTLPPSREEMTKNQV |
| | | | SLSCAVKGFYPSDIAVEWESNGQPENNYKTTPPVLDSDGSF |
| | | | FLVSKLTVDKSRWQQGNVFSCSVMHEALHNHYTQKSLSLS |
| | | | PGK |
| | 9 | anti-TCRvβ | QVQLVQSGAEVKKPGSSVKVSCKASGYSFTTYYIHWVRQA |
| | | VH | PGQGLEWMGWFFPGSGNIKYNEKFKGRVTITADTSTSTAY |
| | | | MELSSLRSEDTAVYYCAGSYYSYDVLDYWGQGTTVTVSS |
| | 3649 | Human IgG1 | ASTKGPSVFPLAPSSKSTSGGTAALGCLVKDYFPEPVTVSW |
| | | hole cys | NSGALTSGVHTFPAVLQSSGLYSLSSVVTVPSSSLGTQTYIC |
| | | N297A | NVNHKPSNTKVDKRVEPKSCDKTHTCPPCPAPELLGGPSVF |
| | | | LFPPKPKDTLMISRTPEVTCVVVDVSHEDPEVKFNWYVDG |
| | | | VEVHNAKTKPREEQYASTYRVVSVLTVLHQDWLNGKEYK |
| | | | CKVSNKALPAPIEKTISKAKGQPREPQVCTLPPSREEMTKNQ |
| | | | VSLSCAVKGFYPSDIAVEWESNGQPENNYKTTPPVLDSDGS |
| | | | FFLVSKLTVDKSRWQQGNVFSCSVMHEALHNHYTQKSLSL |
| | | | SPGK |
| Chain 2 | 7515 | Full Sequence | APASSSTKKTQLQLEHLLLDLQMILNGINNYKNPKLTRMLT |
| (IL2-Fc) | | | AKFAMPKKATELKHLQCLEEELKPLEEVLNGAQSKNFHLR |
| | | | PRDLISNINVIVLELKGSETTFMCEYADETATIVEFLNRWITF |
| | | | AQSIISTLTGGGGSGGGGSDKTHTCPPCPAPELLGGPSVFLFP |
| | | | PKPKDTLMISRTPEVTCVVVDVSHEDPEVKFNWYVDGVEV |
| | | | HNAKTKPREEQYASTYRVVSVLTVLHQDWLNGKEYKCKV |
| | | | SNKALPAPIEKTISKAKGQPREPQVYTLPPCREEMTKNQVSL |
| | | | WCLVKGFYPSDIAVEWESNGQPENNYKTTPPVLDSDGSFFL |
| | | | YSKLTVDKSRWQQGNVFSCSVMHEALHNHYTQKSLSLSPG |
| | | | K |
| | 2280 | IL-2 | APASSSTKKTQLQLEHLLLDLQMILNGINNYKNPKLTRMLT |
| | | | AKFAMPKKATELKHLQCLEEELKPLEEVLNGAQSKNFHLR |
| | | | PRDLISNINVIVLELKGSETTFMCEYADETATIVEFLNRWITF |
| | | | AQSIISTLT |
| | 3308 | linker | GGGGSGGGGS |
| | 3648 | Human Fc | DKTHTCPPCPAPELLGGPSVFLFPPKPKDTLMISRTPEVTCV |
| | | Knob cys | VVDVSHEDPEVKFNWYVDGVEVHNAKTKPREEQYASTYR |
| | | N297A | VVSVLTVLHQDWLNGKEYKCKVSNKALPAPIEKTISKAKG |
| | | | QPREPQVYTLPPCREEMTKNQVSLWCLVKGFYPSDIAVEW |
| | | | ESNGQPENNYKTTPPVLDSDGSFFLYSKLTVDKSRWQQGN |
| | | | VFSCSVMHEALHNHYTQKSLSLSPGK |
| Chain 3 | 4005 | Full Sequence | DIQMTQSPSSLSASVGDRVTITCKASQNVGINVVWHQQKPG |
| (light chain) | | | KVPKALIYSSSHRYSGVPSRFSGSGSGTDFTLTISSLQPEDVA |
| | | | TYFCQQFKSYPLTFGQGTKLEIKRTVAAPSVFIFPPSDEQLKS |
| | | | GTASVVCLLNNFYPREAKVQWKVDNALQSGNSQESVTEQ |
| | | | DSKDSTYSLSSTLTLSKADYEKHKVYACEVTHQGLSSPVTK |
| | | | SFNRGEC |
| | 11 | anti-TCRvβ | DIQMTQSPSSLSASVGDRVTITCKASQNVGINVVWHQQKPG |
| | | VL | KVPKALIYSSSHRYSGVPSRFSGSGSGTDFTLTISSLQPEDVA |
| | | | TYFCQQFKSYPLTFGQGTKLEIK |
| | 3644 | Immunoglobulin | RTVAAPSVFIFPPSDEQLKSGTASVVCLLNNFYPREAKVQW |
| | | kappa | KVDNALQSGNSQESVTEQDSKDSTYSLSSTLTLSKADYEKH |
| | | constant C | KVYACEVTHQGLSSPVTKSFNRGEC |
| | | region | |

Humanized Molecule 4

| | | | |
|---|---|---|---|
| Chain 1 | 4006 | Full Sequence | QVQLVQSGAEVKKPGSSVKVSCKASGYSFTTYYIHWVRQA |
| (heavy | | | PGQGLEWMGWFFPGSGNIKYNEKFKGRVTITADTSTSTAY |
| chain) | | | MELSSLRSEDTAVYYCAGSYYSYDVLDYWGQGTTVTVSSA |
| | | | STKGPSVFPLAPSSKSTSGGTAALGCLVKDYFPEPVTVSWN |
| | | | SGALTSGVHTFPAVLQSSGLYSLSSVVTVPSSSLGTQTYICN |
| | | | VNHKPSNTKVDKRVEPKSCDKTHTCPPCPAPELLGGPSVFL |
| | | | FPPKPKDTLMISRTPEVTCVVVDVSHEDPEVKFNWYVDGV |
| | | | EVHNAKTKPREEQYASTYRVVSVLTVLHQDWLNGKEYKC |
| | | | KVSNKALPAPIEKTISKAKGQPREPQVCTLPPSREEMTKNQV |
| | | | SLSCAVKGFYPSDIAVEWESNGQPENNYKTTPPVLDSDGSF |
| | | | FLVSKLTVDKSRWQQGNVFSCSVMHEALHNHYTQKSLSLS |
| | | | P |
| | 9 | anti-TCRvβ | QVQLVQSGAEVKKPGSSVKVSCKASGYSFTTYYIHWVRQA |
| | | VH | PGQGLEWMGWFFPGSGNIKYNEKFKGRVTITADTSTSTAY |
| | | | MELSSLRSEDTAVYYCAGSYYSYDVLDYWGQGTTVTVSS |
| | 4001 | Human IgG1 | ASTKGPSVFPLAPSSKSTSGGTAALGCLVKDYFPEPVTVSW |
| | | hole cys | NSGALTSGVHTFPAVLQSSGLYSLSSVVTVPSSSLGTQTYIC |
| | | N297A | NVNHKPSNTKVDKRVEPKSCDKTHTCPPCPAPELLGGPSVF |
| | | | LFPPKPKDTLMISRTPEVTCVVVDVSHEDPEVKFNWYVDG |
| | | | VEVHNAKTKPREEQYASTYRVVSVLTVLHQDWLNGKEYK |
| | | | CKVSNKALPAPIEKTISKAKGQPREPQVCTLPPSREEMTKNQ |
| | | | VSLSCAVKGFYPSDIAVEWESNGQPENNYKTTPPVLDSDGS |
| | | | FFLVSKLTVDKSRWQQGNVFSCSVMHEALHNHYTQKSLSL |
| | | | SP |
| Chain 2 | 4007 | Full Sequence | APASSSTKKTQLQLEHLLLDLQMILNGINNYKNPKLTRMLT |
| (IL2-Fc) | | | AKFAMPKKATELKHLQCLEEELKPLEEVLNGAQSKNFHLR |
| | | | PRDLISNINVIVLELKGSETTFMCEYADETATIVEFLNRWITF |
| | | | AQSIISTLTGGGGSGGGGSDKTHTCPPCPAPELLGGPSVFLFP |
| | | | PKPKDTLMISRTPEVTCVVVDVSHEDPEVKFNWYVDGVEV |
| | | | HNAKTKPREEQYASTYRVVSVLTVLHQDWLNGKEYKCKV |
| | | | SNKALPAPIEKTISKAKGQPREPQVYTLPPCREEMTKNQVSL |
| | | | WCLVKGFYPSDIAVEWESNGQPENNYKTTPPVLDSDGSFFL |
| | | | YSKLTVDKSRWQQGNVFSCSVMHEALHNHYTQKSLSLSP |
| | 2280 | IL-2 | APASSSTKKTQLQLEHLLLDLQMILNGINNYKNPKLTRMLT |
| | | | AKFAMPKKATELKHLQCLEEELKPLEEVLNGAQSKNFHLR |
| | | | PRDLISNINVIVLELKGSETTFMCEYADETATIVEFLNRWITF |
| | | | AQSIISTLT |
| | 3308 | linker | GGGGSGGGGS |
| | 4003 | Human Fc | DKTHTCPPCPAPELLGGPSVFLFPPKPKDTLMISRTPEVTCV |
| | | Knob cys | VVDVSHEDPEVKFNWYVDGVEVHNAKTKPREEQYASTYR |
| | | N297A | VVSVLTVLHQDWLNGKEYKCKVSNKALPAPIEKTISKAKG |
| | | | QPREPQVYTLPPCREEMTKNQVSLWCLVKGFYPSDIAVEW |
| | | | ESNGQPENNYKTTPPVLDSDGSFFLYSKLTVDKSRWQQGN |
| | | | VFSCSVMHEALHNHYTQKSLSLSP |
| Chain 3 | 4005 | Full Sequence | DIQMTQSPSSLSASVGDRVTITCKASQNVGINVVWHQQKPG |
| (light chain) | | | KVPKALIYSSSHRYSGVPSRFSGSGSGTDFTLTISSLQPEDVA |
| | | | TYFCQQFKSYPLTFGQGTKLEIKRTVAAPSVFIFPPSDEQLKS |
| | | | GTASVVCLLNNFYPREAKVQWKVDNALQSGNSQESVTEQ |
| | | | DSKDSTYSLSSTLTLSKADYEKHKVYACEVTHQGLSSPVTK |
| | | | SFNRGEC |
| | 11 | anti-TCRvβ | DIQMTQSPSSLSASVGDRVTITCKASQNVGINVVWHQQKPG |
| | | VL | KVPKALIYSSSHRYSGVPSRFSGSGSGTDFTLTISSLQPEDVA |
| | | | TYFCQQFKSYPLTFGQGTKLEIK |
| | 3644 | Immunoglobulin | RTVAAPSVFIFPPSDEQLKSGTASVVCLLNNFYPREAKVQW |
| | | kappa | KVDNALQSGNSQESVTEQDSKDSTYSLSSTLTLSKADYEKH |
| | | constant C | KVYACEVTHQGLSSPVTKSFNRGEC |
| | | region | |

Humanized Molecule 5

| | | | |
|---|---|---|---|
| Chain 1 | 4008 | Full Sequence | QVQLVQSGAEVKKPGSSVKVSCKASGTDFDKIYIHWVRQA |
| (heavy | | | PGQGLEWMGRVSAGSGNTKYNEKFKGRVTITADTSTSTAY |
| chain) | | | MELSSLRSEDTAVYYCAGSYYSYDVLDYWGQGTTVTVSSA |
| | | | STKGPSVFPLAPSSKSTSGGTAALGCLVKDYFPEPVTVSWN |
| | | | SGALTSGVHTFPAVLQSSGLYSLSSVVTVPSSSLGTQTYICN |
| | | | VNHKPSNTKVDKRVEPKSCDKTHTCPPCPAPELLGGPSVFL |
| | | | FPPKPKDTLMISRTPEVTCVVVDVSHEDPEVKFNWYVDGV |
| | | | EVHNAKTKPREEQYASTYRVVSVLTVLHQDWLNGKEYKC |
| | | | KVSNKALPAPIEKTISKAKGQPREPQVCTLPPSREEMTKNQV |
| | | | SLSCAVKGFYPSDIAVEWESNGQPENNYKTTPPVLDSDGSF |
| | | | FLVSKLTVDKSRWQQGNVFSCSVMHEALHNHYTQKSLSLS |
| | | | PGK |
| | 109 | anti-TCRvβ | QVQLVQSGAEVKKPGSSVKVSCKASGTDFDKIYIHWVRQA |
| | | VH | PGQGLEWMGRVSAGSGNTKYNEKFKGRVTITADTSTSTAY |
| | | | MELSSLRSEDTAVYYCAGSYYSYDVLDYWGQGTTVTVSS |
| | 3649 | Human IgG1 | ASTKGPSVFPLAPSSKSTSGGTAALGCLVKDYFPEPVTVSW |
| | | hole cys | NSGALTSGVHTFPAVLQSSGLYSLSSVVTVPSSSLGTQTYIC |
| | | N297A | NVNHKPSNTKVDKRVEPKSCDKTHTCPPCPAPELLGGPSVF |
| | | | LFPPKPKDTLMISRTPEVTCVVVDVSHEDPEVKFNWYVDG |
| | | | VEVHNAKTKPREEQYASTYRVVSVLTVLHQDWLNGKEYK |
| | | | CKVSNKALPAPIEKTISKAKGQPREPQVCTLPPSREEMTKNQ |
| | | | VSLSCAVKGFYPSDIAVEWESNGQPENNYKTTPPVLDSDGS |
| | | | FFLVSKLTVDKSRWQQGNVFSCSVMHEALHNHYTQKSLSL |
| | | | SPGK |
| Chain 2 | 3521 | Full Sequence | APTSSSTKKTQLQLEHLLLDLQMILNGINNYKNPKLTRMLT |
| (IL2-Fc) | | | FKFYMPKKATELKHLQCLEEELKPLEEVLNLAQSKNFHLRP |
| | | | RDLISNINVIVLELKGSETTFMCEYADETATIVEFLNRWITFA |
| | | | QSIISTLTGGGGSGGGGSDKTHTCPPCPAPELLGGPSVFLFPP |
| | | | KPKDTLMISRTPEVTCVVVDVSHEDPEVKFNWYVDGVEVH |
| | | | NAKTKPREEQYASTYRVVSVLTVLHQDWLNGKEYKCKVS |
| | | | NKALPAPIEKTISKAKGQPREPQVYTLPPCREEMTKNQVSL |
| | | | WCLVKGFYPSDIAVEWESNGQPENNYKTTPPVLDSDGSFFL |
| | | | YSKLTVDKSRWQQGNVFSCSVMHEALHNHYTQKSLSLSPG |
| | | | K |
| | 2270 | IL-2 C125A | APTSSSTKKTQLQLEHLLLDLQMILNGINNYKNPKLTRMLT |
| | | | FKFYMPKKATELKHLQCLEEELKPLEEVLNLAQSKNFHLRP |
| | | | RDLISNINVIVLELKGSETTFMCEYADETATIVEFLNRWITFA |
| | | | QSIISTLT |
| | 3308 | linker | GGGGSGGGGS |
| | 3648 | Human Fc | DKTHTCPPCPAPELLGGPSVFLFPPKPKDTLMISRTPEVTCV |
| | | Knob cys | VVDVSHEDPEVKFNWYVDGVEVHNAKTKPREEQYASTYR |
| | | N297A | VVSVLTVLHQDWLNGKEYKCKVSNKALPAPIEKTISKAKG |
| | | | QPREPQVYTLPPCREEMTKNQVSLWCLVKGFYPSDIAVEW |
| | | | ESNGQPENNYKTTPPVLDSDGSFFLYSKLTVDKSRWQQGN |
| | | | VFSCSVMHEALHNHYTQKSLSLSPGK |
| Chain 3 | 4009 | Full Sequence | DIQMTQSPSFLSASVGDRVTITCKASQNVGNRVAWYQQKP |
| (light chain) | | | GKAPKALIYSSSHRYKGVPSRFSGSGSGTEFTLTISSLQPEDF |
| | | | ATYFCQQFKSYPLTFGQGTKLEIKRTVAAPSVFIFPPSDEQL |
| | | | KSGTASVVCLLNNFYPREAKVQWKVDNALQSGNSQESVTE |
| | | | QDSKDSTYSLSSTLTLSKADYEKHKVYACEVTHQGLSSPVT |
| | | | KSFNRGEC |
| | 108 | anti-TCRvβ | DIQMTQSPSFLSASVGDRVTITCKASQNVGNRVAWYQQKP |
| | | VL | GKAPKALIYSSSHRYKGVPSRFSGSGSGTEFTLTISSLQPEDF |
| | | | ATYFCQQFKSYPLTFGQGTKLEIK |
| | 3644 | Immunoglobulin | RTVAAPSVFIFPPSDEQLKSGTASVVCLLNNFYPREAKVQW |
| | | kappa | KVDNALQSGNSQESVTEQDSKDSTYSLSSTLTLSKADYEKH |
| | | constant C | KVYACEVTHQGLSSPVTKSFNRGEC |
| | | region | |

Humanized Molecule 6

| | | | |
|---|---|---|---|
| Chain 1 | 4010 | Full Sequence | QVQLVQSGAEVKKPGSSVKVSCKASGTDFDKIYIHWVRQA |
| (heavy | | | PGQGLEWMGRVSAGSGNTKYNEKFKGRVTITADTSTSTAY |
| chain) | | | MELSSLRSEDTAVYYCAGSYYSYDVLDYWGQGTTVTVSSA |
| | | | STKGPSVFPLAPSSKSTSGGTAALGCLVKDYFPEPVTVSWN |
| | | | SGALTSGVHTFPAVLQSSGLYSLSSVVTVPSSSLGTQTYICN |
| | | | VNHKPSNTKVDKRVEPKSCDKTHTCPPCPAPELLGGPSVFL |
| | | | FPPKPKDTLMISRTPEVTCVVVDVSHEDPEVKFNWYVDGV |
| | | | EVHNAKTKPREEQYASTYRVVSVLTVLHQDWLNGKEYKC |
| | | | KVSNKALPAPIEKTISKAKGQPREPQVCTLPPSREEMTKNQV |
| | | | SLSCAVKGFYPSDIAVEWESNGQPENNYKTTPPVLDSDGSF |
| | | | FLVSKLTVDKSRWQQGNVFSCSVMHEALHNHYTQKSLSLS |
| | | | P |
| | 109 | anti-TCRvβ | QVQLVQSGAEVKKPGSSVKVSCKASGTDFDKIYIHWVRQA |
| | | VH | PGQGLEWMGRVSAGSGNTKYNEKFKGRVTITADTSTSTAY |
| | | | MELSSLRSEDTAVYYCAGSYYSYDVLDYWGQGTTVTVSS |
| | 4001 | Human IgG1 | ASTKGPSVFPLAPSSKSTSGGTAALGCLVKDYFPEPVTVSW |
| | | hole cys | NSGALTSGVHTFPAVLQSSGLYSLSSVVTVPSSSLGTQTYIC |
| | | N297A | NVNHKPSNTKVDKRVEPKSCDKTHTCPPCPAPELLGGPSVF |
| | | | LFPPKPKDTLMISRTPEVTCVVVDVSHEDPEVKFNWYVDG |
| | | | VEVHNAKTKPREEQYASTYRVVSVLTVLHQDWLNGKEYK |
| | | | CKVSNKALPAPIEKTISKAKGQPREPQVCTLPPSREEMTKNQ |
| | | | VSLSCAVKGFYPSDIAVEWESNGQPENNYKTTPPVLDSDGS |
| | | | FFLVSKLTVDKSRWQQGNVFSCSVMHEALHNHYTQKSLSL |
| | | | SP |
| Chain 2 | 7516 | Full Sequence | APTSSSTKKTQLQLEHLLLDLQMILNGINNYKNPKLTRMLT |
| (IL2-Fc) | | | FKFYMPKKATELKHLQCLEEELKPLEEVLNLAQSKNFHLRP |
| | | | RDLISNINVIVLELKGSETTFMCEYADETATIVEFLNRWITFA |
| | | | QSIISTLTGGGGSGGGGSDKTHTCPPCPAPELLGGPSVFLFPP |
| | | | KPKDTLMISRTPEVTCVVVDVSHEDPEVKFNWYVDGVEVH |
| | | | NAKTKPREEQYASTYRVVSVLTVLHQDWLNGKEYKCKVS |
| | | | NKALPAPIEKTISKAKGQPREPQVYTLPPCREEMTKNQVSL |
| | | | WCLVKGFYPSDIAVEWESNGQPENNYKTTPPVLDSDGSFFL |
| | | | YSKLTVDKSRWQQGNVFSCSVMHEALHNHYTQKSLSLSP |
| | 2270 | IL-2 C125A | APTSSSTKKTQLQLEHLLLDLQMILNGINNYKNPKLTRMLT |
| | | | FKFYMPKKATELKHLQCLEEELKPLEEVLNLAQSKNFHLRP |
| | | | RDLISNINVIVLELKGSETTFMCEYADETATIVEFLNRWITFA |
| | | | QSIISTLT |
| | 3308 | linker | GGGGSGGGGS |
| | 3648 | Human Fc | DKTHTCPPCPAPELLGGPSVFLFPPKPKDTLMISRTPEVTCV |
| | | Knob cys | VVDVSHEDPEVKFNWYVDGVEVHNAKTKPREEQYASTYR |
| | | N297A | VVSVLTVLHQDWLNGKEYKCKVSNKALPAPIEKTISKAKG |
| | | | QPREPQVYTLPPCREEMTKNQVSLWCLVKGFYPSDIAVEW |
| | | | ESNGQPENNYKTTPPVLDSDGSFFLYSKLTVDKSRWQQGN |
| | | | VFSCSVMHEALHNHYTQKSLSLSPGK |
| | 4003 | Human Fc | DKTHTCPPCPAPELLGGPSVFLFPPKPKDTLMISRTPEVTCV |
| | | Knob cys | VVDVSHEDPEVKFNWYVDGVEVHNAKTKPREEQYASTYR |
| | | N297A | VVSVLTVLHQDWLNGKEYKCKVSNKALPAPIEKTISKAKG |
| | | | QPREPQVYTLPPCREEMTKNQVSLWCLVKGFYPSDIAVEW |
| | | | ESNGQPENNYKTTPPVLDSDGSFFLYSKLTVDKSRWQQGN |
| | | | VFSCSVMHEALHNHYTQKSLSLSP |
| Chain 3 | 4009 | Full Sequence | DIQMTQSPSFLSASVGDRVTITCKASQNVGNRVAWYQQKP |
| (light chain) | | | GKAPKALIYSSSHRYKGVPSRFSGSGSGTEFTLTISSLQPEDF |
| | | | ATYFCQQFKSYPLTFGQGTKLEIKRTVAAPSVFIFPPSDEQL |
| | | | KSGTASVVCLLNNFYPREAKVQWKVDNALQSGNSQESVTE |
| | | | QDSKDSTYSLSSTLTLSKADYEKHKVYACEVTHQGLSSPVT |
| | | | KSFNRGEC |
| | 108 | anti-TCRvβ | DIQMTQSPSFLSASVGDRVTITCKASQNVGNRVAWYQQKP |
| | | VL | GKAPKALIYSSSHRYKGVPSRFSGSGSGTEFTLTISSLQPEDF |
| | | | ATYFCQQFKSYPLTFGQGTKLEIK |
| | 3644 | Immunoglobulin | RTVAAPSVFIFPPSDEQLKSGTASVVCLLNNFYPREAKVQW |
| | | kappa | KVDNALQSGNSQESVTEQDSKDSTYSLSSTLTLSKADYEKH |
| | | constant C | KVYACEVTHQGLSSPVTKSFNRGEC |
| | | region | |

Humanized Molecule 7

| | | | |
|---|---|---|---|
| Chain 1 | 4011 | Full Sequence | QVQLVQSGAEVKKPGSSVKVSCKASGHDFKLTYIHWVRQA |
| (heavy | | | PGQGLEWMGRVSPGSGNTKYNEKFKGRVTITADTSTSTAY |
| chain) | | | MELSSLRSEDTAVYYCAGSYYSYDVLDYWGQGTTVTVSSA |
| | | | STKGPSVFPLAPSSKSTSGGTAALGCLVKDYFPEPVTVSWN |
| | | | SGALTSGVHTFPAVLQSSGLYSLSSVVTVPSSSLGTQTYICN |
| | | | VNHKPSNTKVDKRVEPKSCDKTHTCPPCPAPELLGGPSVFL |
| | | | FPPKPKDTLMISRTPEVTCVVVDVSHEDPEVKFNWYVDGV |
| | | | EVHNAKTKPREEQYASTYRVVSVLTVLHQDWLNGKEYKC |
| | | | KVSNKALPAPIEKTISKAKGQPREPQVCTLPPSREEMTKNQV |
| | | | SLSCAVKGFYPSDIAVEWESNGQPENNYKTTPPVLDSDGSF |
| | | | FLVSKLTVDKSRWQQGNVFSCSVMHEALHNHYTQKSLSLS |
| | | | PGK |
| | 182 | anti-TCRvβ | QVQLVQSGAEVKKPGSSVKVSCKASGHDFKLTYIHWVRQA |
| | | VH | PGQGLEWMGRVSPGSGNTKYNEKFKGRVTITADTSTSTAY |
| | | | MELSSLRSEDTAVYYCAGSYYSYDVLDYWGQGTTVTVSS |
| | 3649 | Human IgG1 | ASTKGPSVFPLAPSSKSTSGGTAALGCLVKDYFPEPVTVSW |
| | | hole cys | NSGALTSGVHTFPAVLQSSGLYSLSSVVTVPSSSLGTQTYIC |
| | | N297A | NVNHKPSNTKVDKRVEPKSCDKTHTCPPCPAPELLGGPSVF |
| | | | LFPPKPKDTLMISRTPEVTCVVVDVSHEDPEVKFNWYVDG |
| | | | VEVHNAKTKPREEQYASTYRVVSVLTVLHQDWLNGKEYK |
| | | | CKVSNKALPAPIEKTISKAKGQPREPQVCTLPPSREEMTKNQ |
| | | | VSLSCAVKGFYPSDIAVEWESNGQPENNYKTTPPVLDSDGS |
| | | | FFLVSKLTVDKSRWQQGNVFSCSVMHEALHNHYTQKSLSL |
| | | | SPGK |
| Chain 2 | 4013 | Full Sequence | APTSSSTKKTQLQLEHLLLDLQMILNGINNYKNPKLTRMLT |
| (IL2-Fc) | | | FKFYMPKKATELKHLQCLEEELKPLEEVLNLAQSKNFHLRP |
| | | | RDLISNINVIVLELKGSETTFMCEYADETATIVEFLNRWITFC |
| | | | QSIISTLTGGGGSGGGGSDKTHTCPPCPAPELLGGPSVFLFPP |
| | | | KPKDTLMISRTPEVTCVVVDVSHEDPEVKFNWYVDGVEVH |
| | | | NAKTKPREEQYASTYRVVSVLTVLHQDWLNGKEYKCKVS |
| | | | NKALPAPIEKTISKAKGQPREPQVYTLPPCREEMTKNQVSL |
| | | | WCLVKGFYPSDIAVEWESNGQPENNYKTTPPVLDSDGSFFL |
| | | | YSKLTVDKSRWQQGNVFSCSVMHEALHNHYTQKSLSLSPG |
| | | | K |
| | 2191 | IL-2 | APTSSSTKKTQLQLEHLLLDLQMILNGINNYKNPKLTRMLT |
| | | | FKFYMPKKATELKHLQCLEEELKPLEEVLNLAQSKNFHLRP |
| | | | RDLISNINVIVLELKGSETTFMCEYADETATIVEFLNRWITFC |
| | | | QSIISTLT |
| | 3308 | linker | GGGGSGGGGS |
| | 3648 | Human Fc | DKTHTCPPCPAPELLGGPSVFLFPPKPKDTLMISRTPEVTCV |
| | | Knob cys | VVDVSHEDPEVKFNWYVDGVEVHNAKTKPREEQYASTYR |
| | | N297A | VVSVLTVLHQDWLNGKEYKCKVSNKALPAPIEKTISKAKG |
| | | | QPREPQVYTLPPCREEMTKNQVSLWCLVKGFYPSDIAVEW |
| | | | ESNGQPENNYKTTPPVLDSDGSFFLYSKLTVDKSRWQQGN |
| | | | VFSCSVMHEALHNHYTQKSLSLSPGK |
| Chain 3 | 4012 | Full Sequence | DIQMTQSPSFLSASVGDRVTITCKASQNVEDRVAWHQQKP |
| (light chain) | | | GKAPKALIYSSSHRYKGVPSRFSGSGSGTEFTLTISSLQPEDF |
| | | | ATYFCQQFKSYPLTFGQGTKLEIKRTVAAPSVFIFPPSDEQL |
| | | | KSGTASVVCLLNNFYPREAKVQWKVDNALQSGNSQESVTE |
| | | | QDSKDSTYSLSSTLTLSKADYEKHKVYACEVTHQGLSSPVT |
| | | | KSFNRGEC |
| | 181 | anti-TCRvβ | DIQMTQSPSFLSASVGDRVTITCKASQNVEDRVAWHQQKP |
| | | VL | GKAPKALIYSSSHRYKGVPSRFSGSGSGTEFTLTISSLQPEDF |
| | | | ATYFCQQFKSYPLTFGQGTKLEIK |
| | 3644 | Immunoglobulin | RTVAAPSVFIFPPSDEQLKSGTASVVCLLNNFYPREAKVQW |
| | | kappa | KVDNALQSGNSQESVTEQDSKDSTYSLSSTLTLSKADYEKH |
| | | constant C | KVYACEVTHQGLSSPVTKSFNRGEC |
| | | region | |

Humanized Molecule 8

| | | | |
|---|---|---|---|
| Chain 1 | 4014 | Full Sequence | QVQLVQSGAEVKKPGSSVKVSCKASGHDFKLTYIHWVRQA |
| (heavy | | | PGQGLEWMGRVSPGSGNTKYNEKFKGRVTITADTSTSTAY |
| chain) | | | MELSSLRSEDTAVYYCAGSYYSYDVLDYWGQGTTVTVSSA |
| | | | STKGPSVFPLAPSSKSTSGGTAALGCLVKDYFPEPVTVSWN |
| | | | SGALTSGVHTFPAVLQSSGLYSLSSVVTVPSSSLGTQTYICN |
| | | | VNHKPSNTKVDKRVEPKSCDKTHTCPPCPAPELLGGPSVFL |
| | | | FPPKPKDTLMISRTPEVTCVVVDVSHEDPEVKFNWYVDGV |
| | | | EVHNAKTKPREEQYASTYRVVSVLTVLHQDWLNGKEYKC |
| | | | KVSNKALPAPIEKTISKAKGQPREPQVCTLPPSREEMTKNQV |
| | | | SLSCAVKGFYPSDIAVEWESNGQPENNYKTTPPVLDSDGSF |
| | | | FLVSKLTVDKSRWQQGNVFSCSVMHEALHNHYTQKSLSLS |
| | | | P |
| | 182 | anti-TCRvβ | QVQLVQSGAEVKKPGSSVKVSCKASGHDFKLTYIHWVRQA |
| | | VH | PGQGLEWMGRVSPGSGNTKYNEKFKGRVTITADTSTSTAY |
| | | | MELSSLRSEDTAVYYCAGSYYSYDVLDYWGQGTTVTVSS |
| | 4001 | Human IgG1 | ASTKGPSVFPLAPSSKSTSGGTAALGCLVKDYFPEPVTVSW |
| | | hole cys | NSGALTSGVHTFPAVLQSSGLYSLSSVVTVPSSSLGTQTYIC |
| | | N297A | NVNHKPSNTKVDKRVEPKSCDKTHTCPPCPAPELLGGPSVF |
| | | | LFPPKPKDTLMISRTPEVTCVVVDVSHEDPEVKFNWYVDG |
| | | | VEVHNAKTKPREEQYASTYRVVSVLTVLHQDWLNGKEYK |
| | | | CKVSNKALPAPIEKTISKAKGQPREPQVCTLPPSREEMTKNQ |
| | | | VSLSCAVKGFYPSDIAVEWESNGQPENNYKTTPPVLDSDGS |
| | | | FFLVSKLTVDKSRWQQGNVFSCSVMHEALHNHYTQKSLSL |
| | | | SP |
| Chain 2 | 4015 | Full Sequence | APTSSSTKKTQLQLEHLLLDLQMILNGINNYKNPKLTRMLT |
| (IL2-Fc) | | | FKFYMPKKATELKHLQCLEEELKPLEEVLNLAQSKNFHLRP |
| | | | RDLISNINVIVLELKGSETTFMCEYADETATIVEFLNRWITFC |
| | | | QSIISTLTGGGGSGGGGSDKTHTCPPCPAPELLGGPSVFLFPP |
| | | | KPKDTLMISRTPEVTCVVVDVSHEDPEVKFNWYVDGVEVH |
| | | | NAKTKPREEQYASTYRVVSVLTVLHQDWLNGKEYKCKVS |
| | | | NKALPAPIEKTISKAKGQPREPQVYTLPPCREEMTKNQVSL |
| | | | WCLVKGFYPSDIAVEWESNGQPENNYKTTPPVLDSDGSFFL |
| | | | YSKLTVDKSRWQQGNVFSCSVMHEALHNHYTQKSLSLSP |
| | 2191 | IL-2 | APTSSSTKKTQLQLEHLLLDLQMILNGINNYKNPKLTRMLT |
| | | | FKFYMPKKATELKHLQCLEEELKPLEEVLNLAQSKNFHLRP |
| | | | RDLISNINVIVLELKGSETTFMCEYADETATIVEFLNRWITFC |
| | | | QSIISTLT |
| | 3308 | linker | GGGGSGGGGS |
| | 4003 | Human Fc | DKTHTCPPCPAPELLGGPSVFLFPPKPKDTLMISRTPEVTCV |
| | | Knob cys | VVDVSHEDPEVKFNWYVDGVEVHNAKTKPREEQYASTYR |
| | | N297A | VVSVLTVLHQDWLNGKEYKCKVSNKALPAPIEKTISKAKG |
| | | | QPREPQVYTLPPCREEMTKNQVSLWCLVKGFYPSDIAVEW |
| | | | ESNGQPENNYKTTPPVLDSDGSFFLYSKLTVDKSRWQQGN |
| | | | VFSCSVMHEALHNHYTQKSLSLSP |
| Chain 3 | 4012 | Full Sequence | DIQMTQSPSFLSASVGDRVTITCKASQNVEDRVAWHQQKP |
| (light chain) | | | GKAPKALIYSSSHRYKGVPSRFSGSGSGTEFTLTISSLQPEDF |
| | | | ATYFCQQFKSYPLTFGQGTKLEIKRTVAAPSVFIFPPSDEQL |
| | | | KSGTASVVCLLNNFYPREAKVQWKVDNALQSGNSQESVTE |
| | | | QDSKDSTYSLSSTLTLSKADYEKHKVYACEVTHQGLSSPVT |
| | | | KSFNRGEC |
| | 181 | anti-TCRvβ | DIQMTQSPSFLSASVGDRVTITCKASQNVEDRVAWHQQKP |
| | | VL | GKAPKALIYSSSHRYKGVPSRFSGSGSGTEFTLTISSLQPEDF |
| | | | ATYFCQQFKSYPLTFGQGTKLEIK |
| | 3644 | Immunoglobulin | RTVAAPSVFIFPPSDEQLKSGTASVVCLLNNFYPREAKVQW |
| | | kappa | KVDNALQSGNSQESVTEQDSKDSTYSLSSTLTLSKADYEKH |
| | | constant C | KVYACEVTHQGLSSPVTKSFNRGEC |
| | | region | |

Humanized Molecule 9

| | | | |
|---|---|---|---|
| Chain 1 | 4016 | Full Sequence | QVQLVQSGAEVKKPGSSVKVSCKASGTDFDKTYIHWVRQA |
| (heavy | | | PGQGLEWMGRISAGSGNVKYNEKFKGRVTITADTSTSTAY |
| chain) | | | MELSSLRSEDTAVYYCAGSYYSYDVLDYWGQGTTVTVSSA |
| | | | STKGPSVFPLAPSSKSTSGGTAALGCLVKDYFPEPVTVSWN |
| | | | SGALTSGVHTFPAVLQSSGLYSLSSVVTVPSSSLGTQTYICN |
| | | | VNHKPSNTKVDKRVEPKSCDKTHTCPPCPAPELLGGPSVFL |
| | | | FPPKPKDTLMISRTPEVTCVVVDVSHEDPEVKFNWYVDGV |
| | | | EVHNAKTKPREEQYASTYRVVSVLTVLHQDWLNGKEYKC |
| | | | KVSNKALPAPIEKTISKAKGQPREPQVCTLPPSREEMTKNQV |
| | | | SLSCAVKGFYPSDIAVEWESNGQPENNYKTTPPVLDSDGSF |
| | | | FLVSKLTVDKSRWQQGNVFSCSVMHEALHNHYTQKSLSLS |
| | | | PGK |
| | 187 | anti-TCRvβ | QVQLVQSGAEVKKPGSSVKVSCKASGTDFDKTYIHWVRQA |
| | | VH | PGQGLEWMGRISAGSGNVKYNEKFKGRVTITADTSTSTAY |
| | | | MELSSLRSEDTAVYYCAGSYYSYDVLDYWGQGTTVTVSS |
| | 3649 | Human IgG1 | ASTKGPSVFPLAPSSKSTSGGTAALGCLVKDYFPEPVTVSW |
| | | hole cys | NSGALTSGVHTFPAVLQSSGLYSLSSVVTVPSSSLGTQTYIC |
| | | N297A | NVNHKPSNTKVDKRVEPKSCDKTHTCPPCPAPELLGGPSVF |
| | | | LFPPKPKDTLMISRTPEVTCVVVDVSHEDPEVKFNWYVDG |
| | | | VEVHNAKTKPREEQYASTYRVVSVLTVLHQDWLNGKEYK |
| | | | CKVSNKALPAPIEKTISKAKGQPREPQVCTLPPSREEMTKNQ |
| | | | VSLSCAVKGFYPSDIAVEWESNGQPENNYKTTPPVLDSDGS |
| | | | FFLVSKLTVDKSRWQQGNVFSCSVMHEALHNHYTQKSLSL |
| | | | SPGK |
| Chain 2 | 3521 | Full Sequence | APTSSSTKKTQLQLEHLLLDLQMILNGINNYKNPKLTRMLT |
| (IL2-Fc) | | | FKFYMPKKATELKHLQCLEEELKPLEEVLNLAQSKNFHLRP |
| | | | RDLISNINVIVLELKGSETTFMCEYADETATIVEFLNRWITFA |
| | | | QSIISTLTGGGGSGGGGSDKTHTCPPCPAPELLGGPSVFLFPP |
| | | | KPKDTLMISRTPEVTCVVVDVSHEDPEVKFNWYVDGVEVH |
| | | | NAKTKPREEQYASTYRVVSVLTVLHQDWLNGKEYKCKVS |
| | | | NKALPAPIEKTISKAKGQPREPQVYTLPPCREEMTKNQVSL |
| | | | WCLVKGFYPSDIAVEWESNGQPENNYKTTPPVLDSDGSFFL |
| | | | YSKLTVDKSRWQQGNVFSCSVMHEALHNHYTQKSLSLSPG |
| | | | K |
| | 2270 | IL-2 C125A | APTSSSTKKTQLQLEHLLLDLQMILNGINNYKNPKLTRMLT |
| | | | FKFYMPKKATELKHLQCLEEELKPLEEVLNLAQSKNFHLRP |
| | | | RDLISNINVIVLELKGSETTFMCEYADETATIVEFLNRWITFA |
| | | | QSIISTLT |
| | 3308 | linker | GGGGSGGGGS |
| | 3648 | Human Fc | DKTHTCPPCPAPELLGGPSVFLFPPKPKDTLMISRTPEVTCV |
| | | Knob cys | VVDVSHEDPEVKFNWYVDGVEVHNAKTKPREEQYASTYR |
| | | N297A | VVSVLTVLHQDWLNGKEYKCKVSNKALPAPIEKTISKAKG |
| | | | QPREPQVYTLPPCREEMTKNQVSLWCLVKGFYPSDIAVEW |
| | | | ESNGQPENNYKTTPPVLDSDGSFFLYSKLTVDKSRWQQGN |
| | | | VFSCSVMHEALHNHYTQKSLSLSPGK |
| Chain 3 | 4017 | Full Sequence | DIQMTQSPSFLSASVGDRVTITCKASQNVDDRVAWYQQKP |
| (light chain) | | | GKAPKALIYSSSHRYKGVPSRFSGSGSGTEFTLTISSLQPEDF |
| | | | ATYFCQQFKSYPLTFGQGTKLEIKRTVAAPSVFIFPPSDEQL |
| | | | KSGTASVVCLLNNFYPREAKVQWKVDNALQSGNSQESVTE |
| | | | QDSKDSTYSLSSTLTLSKADYEKHKVYACEVTHQGLSSPVT |
| | | | KSFNRGEC |
| | 7513 | anti-TCRvβ | DIQMTQSPSFLSASVGDRVTITCKASQNVDDRVAWYQQKP |
| | | VL | GKAPKALIYSSSHRYKGVPSRFSGSGSGTEFTLTISSLQPEDF |
| | | | ATYFCQQFKSYPLTFGQGTKLEIK |
| | 3644 | Immunoglobulin | RTVAAPSVFIFPPSDEQLKSGTASVVCLLNNFYPREAKVQW |
| | | kappa | KVDNALQSGNSQESVTEQDSKDSTYSLSSTLTLSKADYEKH |
| | | constant C | KVYACEVTHQGLSSPVTKSFNRGEC |
| | | region | |

Humanized Molecule 10

| | | | |
|---|---|---|---|
| Chain 1 | 4018 | Full Sequence | QVQLVQSGAEVKKPGSSVKVSCKASGTDFDKTYIHWVRQA |
| (heavy | | | PGQGLEWMGRISAGSGNVKYNEKFKGRVTITADTSTSTAY |
| chain) | | | MELSSLRSEDTAVYYCAGSYYSYDVLDYWGQGTTVTVSSA |
| | | | STKGPSVFPLAPSSKSTSGGTAALGCLVKDYFPEPVTVSWN |
| | | | SGALTSGVHTFPAVLQSSGLYSLSSVVTVPSSSLGTQTYICN |
| | | | VNHKPSNTKVDKRVEPKSCDKTHTCPPCPAPELLGGPSVFL |
| | | | FPPKPKDTLMISRTPEVTCVVVDVSHEDPEVKFNWYVDGV |
| | | | EVHNAKTKPREEQYASTYRVVSVLTVLHQDWLNGKEYKC |
| | | | KVSNKALPAPIEKTISKAKGQPREPQVCTLPPSREEMTKNQV |
| | | | SLSCAVKGFYPSDIAVEWESNGQPENNYKTTPPVLDSDGSF |
| | | | FLVSKLTVDKSRWQQGNVFSCSVMHEALHNHYTQKSLSLS |
| | | | P |
| | 187 | anti-TCRvβ | QVQLVQSGAEVKKPGSSVKVSCKASGTDFDKTYIHWVRQA |
| | | VH | PGQGLEWMGRISAGSGNVKYNEKFKGRVTITADTSTSTAY |
| | | | MELSSLRSEDTAVYYCAGSYYSYDVLDYWGQGTTVTVSS |
| | 4001 | Human IgG1 | ASTKGPSVFPLAPSSKSTSGGTAALGCLVKDYFPEPVTVSW |
| | | hole cys | NSGALTSGVHTFPAVLQSSGLYSLSSVVTVPSSSLGTQTYIC |
| | | N297A | NVNHKPSNTKVDKRVEPKSCDKTHTCPPCPAPELLGGPSVF |
| | | | LFPPKPKDTLMISRTPEVTCVVVDVSHEDPEVKFNWYVDG |
| | | | VEVHNAKTKPREEQYASTYRVVSVLTVLHQDWLNGKEYK |
| | | | CKVSNKALPAPIEKTISKAKGQPREPQVCTLPPSREEMTKNQ |
| | | | VSLSCAVKGFYPSDIAVEWESNGQPENNYKTTPPVLDSDGS |
| | | | FFLVSKLTVDKSRWQQGNVFSCSVMHEALHNHYTQKSLSL |
| | | | SP |
| Chain 2 | 4002 | Full Sequence | APTSSSTKKTQLQLEHLLLDLQMILNGINNYKNPKLTRMLT |
| (IL2-Fc) | | | FKFYMPKKATELKHLQCLEEELKPLEEVLNLAQSKNFHLRP |
| | | | RDLISNINVIVLELKGSETTFMCEYADETATIVEFLNRWITFA |
| | | | QSIISTLTGGGGSGGGGSDKTHTCPPCPAPELLGGPSVFLFPP |
| | | | KPKDTLMISRTPEVTCVVVDVSHEDPEVKFNWYVDGVEVH |
| | | | NAKTKPREEQYASTYRVVSVLTVLHQDWLNGKEYKCKVS |
| | | | NKALPAPIEKTISKAKGQPREPQVYTLPPCREEMTKNQVSL |
| | | | WCLVKGFYPSDIAVEWESNGQPENNYKTTPPVLDSDGSFFL |
| | | | YSKLTVDKSRWQQGNVFSCSVMHEALHNHYTQKSLSLSP |
| | 2270 | IL-2 C125A | APTSSSTKKTQLQLEHLLLDLQMILNGINNYKNPKLTRMLT |
| | | | FKFYMPKKATELKHLQCLEEELKPLEEVLNLAQSKNFHLRP |
| | | | RDLISNINVIVLELKGSETTFMCEYADETATIVEFLNRWITFA |
| | | | QSIISTLT |
| | 3308 | linker | GGGGSGGGGS |
| | 4003 | Human Fc | DKTHTCPPCPAPELLGGPSVFLFPPKPKDTLMISRTPEVTCV |
| | | Knob cys | VVDVSHEDPEVKFNWYVDGVEVHNAKTKPREEQYASTYR |
| | | N297A | VVSVLTVLHQDWLNGKEYKCKVSNKALPAPIEKTISKAKG |
| | | | QPREPQVYTLPPCREEMTKNQVSLWCLVKGFYPSDIAVEW |
| | | | ESNGQPENNYKTTPPVLDSDGSFFLYSKLTVDKSRWQQGN |
| | | | VFSCSVMHEALHNHYTQKSLSLSP |
| Chain 3 | 4017 | Full Sequence | DIQMTQSPSFLSASVGDRVTITCKASQNVDDRVAWYQQKP |
| (light chain) | | | GKAPKALIYSSSHRYKGVPSRFSGSGSGTEFTLTISSLQPEDF |
| | | | ATYFCQQFKSYPLTFGQGTKLEIKRTVAAPSVFIFPPSDEQL |
| | | | KSGTASVVCLLNNFYPREAKVQWKVDNALQSGNSQESVTE |
| | | | QDSKDSTYSLSSTLTLSKADYEKHKVYACEVTHQGLSSPVT |
| | | | KSFNRGEC |
| | 7513 | anti-TCRvβ | DIQMTQSPSFLSASVGDRVTITCKASQNVDDRVAWYQQKP |
| | | VL | GKAPKALIYSSSHRYKGVPSRFSGSGSGTEFTLTISSLQPEDF |
| | | | ATYFCQQFKSYPLTFGQGTKLEIK |
| | 3644 | Immunoglobulin | RTVAAPSVFIFPPSDEQLKSGTASVVCLLNNFYPREAKVQW |
| | | kappa | KVDNALQSGNSQESVTEQDSKDSTYSLSSTLTLSKADYEKH |
| | | constant C | KVYACEVTHQGLSSPVTKSFNRGEC |
| | | region | |

### EXAMPLES

### Example 1: Selective Depletion of TRBV+ T Cells In Vivo

[0831] Naïve mice were treated with one injection of anti-Vβ13 (mouse) (Fc-wt) depleting antibody (heavy chain and light chain sequences as shown in SEQ ID NO: 7511 and 7512, respectively) and FACS analysis was performed on day 1, 3, 5 or 7 post-treatment. Leukocytes were isolated from spleens and processed for total RNA and TRBV repertoire was measured using a NanoString mouse TCRvβ profiling panel. The Vβ13 antibody had previously been shown to exhibit selectivity towards TRBV13-2 and 13-3 and 65-80 percent depletion of cells expressing these TRBV13 transcripts was observed (FIG. 8). The non-targeted TRBV13-1 was found to be unaffected by this depleting antibody. These results indicated an anti-TRBV antibody was effective to achieve selective depletion of the TRBV+ T cells (healthy and malignant).

[0832] While preferred embodiments of the present disclosure have been shown and described herein, it will be obvious to those skilled in the art that such embodiments are provided by way of example only. Numerous variations, changes, and substitutions will now occur to those skilled in the art without departing from the disclosure. It should be understood that various alternatives to the embodiments of the present disclosure may be employed in practicing the present disclosure. It is intended that the following claims define the scope of the present disclosure and that methods and structures within the scope of these claims and their equivalents be covered thereby.

1.-127. (canceled)

128. A method of treating a disease or condition in a subject in need thereof comprising: administering to the subject a therapeutically effective amount of an agent comprising a first moiety that binds to a first TCR variable region, wherein the disease or condition is ankylosing spondylitis and the first TCR variable region is TCRα V21.

129. The method of claim 128, wherein the agent comprises an antibody molecule or antigen binding domain thereof.

130. The method of claim 129, wherein the antibody molecule or antigen binding domain thereof comprises an Fc region.

131. The method of claim 130, wherein the Fc region comprises no binding mutation.

132. The method of claim 130, wherein the Fc region has enhanced effector function.

133. The method of claim 132, wherein the enhanced effector function comprises antibody dependent cell-mediated cytotoxicity (ADCC), antibody-dependent cellular phagocytosis (ADCP) or complement dependent cytotoxicity (CDC).

134. The method of claim 133, wherein the enhanced effector function mediates killing of one or more autoreactive T cells in the subject.

135. The method of claim 130, wherein the Fc region comprises a sequence having at least 90% sequence identity to the amino acid sequence as set forth in SEQ ID NO: 41.

136. The method of claim 128, wherein the agent further comprises a second moiety.

137. The method of claim 136, wherein the second moiety binds to a second TCR variable region.

138. The method of claim 137, wherein the second TCR variable region is TCRβ V9.

139. The method of claim 128, further comprising administering a second therapeutic agent to the subject.

140. The method of claim 139, wherein the second therapeutic agent comprises a second moiety that binds to a TCRβ V9 region.

141. The method of claim 130, wherein the agent further comprises an NK cell engager that binds to a cell surface protein of an NK cell, wherein the NK cell engager activates the NK cell.

142. The method of claim 141, wherein the cell surface protein is NKp30, NKp40, NKp44, NKp46, NKG2D, DNAM1, DAP10, CD16, CRTAM, CD27, PSGL1, CD96, CD100 (SEMA4D), NKp80, CD244, SLAMF6, SLAMF7, KIR2DS2, KIR2DS4, KIR3DS1, KIR2DS3, KIR2DS5, KIR2DS1, CD94, NKG2C, NKG2E, or CD160.

143. The method of claim 142, wherein the Fc region is a variant Fc region having an amino acid mutation.

144. The method of claim 143, wherein the amino acid mutation is configured to reduce or ablate affinity for at least one Fc receptor.

145. The method of claim 142, wherein the variant Fc region comprises a sequence having at least 90% sequence identity to the amino acid sequence as set forth in SEQ ID NO: 42.

146. A method of treating a disease or condition in a subject in need thereof comprising: administering to the subject a therapeutically effective amount of an agent comprising a first moiety that binds to a first TCR variable region, wherein the disease or condition is ankylosing spondylitis and the first TCR variable region is TCRβ V9, and wherein the first moiety comprises:
(a) a heavy chain variable (VH) domain comprising a heavy chain complementarity determining region 1 (HC CDR1) having a sequence of SEQ ID NO: 1248, a HC CDR2 having a sequence of SEQ ID NO: 1249, and a HC CDR3 having a sequence of SEQ ID NO: 1250, and a light chain variable (VL) domain comprising a light chain complementarity determining region 1 (LC CDR1) having a sequence of SEQ ID NO: 1254, a LC CDR2 having a sequence of SEQ ID NO: 1255, and a LC CDR3 having a sequence of SEQ ID NO: 1256;
(b) a VH domain comprising a HC CDR1 having a sequence of SEQ ID NO: 1251, a HC CDR2 having a sequence of SEQ ID NO: 1252, and a HC CDR3 having a sequence of SEQ ID NO: 1250, and a VL domain comprising a LC CDR1 having a sequence of SEQ ID NO: 1257, a LC CDR2 having a sequence of SEQ ID NO: 1255, and a LC CDR3 having a sequence of SEQ ID NO: 1256; or
(c) a VH domain comprising a HC CDR1 having a sequence of SEQ ID NO: 1253, a HC CDR2 having a sequence of SEQ ID NO: 1249, and a HC CDR3 having a sequence of SEQ ID NO: 1250, and a VL domain comprising a LC CDR1 having a sequence of SEQ ID NO: 1254, a LC CDR2 having a sequence of SEQ ID NO: 1255, and a LC CDR3 having a sequence of SEQ ID NO: 1256.

147. A method of treating a disease or condition in a subject in need thereof comprising: administering to the subject a therapeutically effective amount of an agent comprising a first moiety that binds to a first TCR variable region, wherein the disease or condition is Celiac disease and the first TCR variable region is TCRβ V4 or TCRβ V7.

The application's sequence listing, which the Patent Office published only in electronic form, follows.

SEQUENCE LISTING (7517 sequences)

SEQ ID NO: 1 - protein, 119 aa, synthetic construct
QVQLQQSGPELVKPGTSVKISCKASGYSFTTYYIHWVKQRPGQGLEWIGWFFPGSGNIKYNEKFKGKATLTADTSSSTAYMQLSSLTSEESAVYFCAGSYYSYDVLDYWGHGTTLTVSS

SEQ ID NO: 2 - protein, 107 aa, synthetic construct
DILMTQSQKFMSTSLGDRVSVSCKASQNVGINVVWHQQKPGQSPKALIYSSSHRYSGVPDRFTGSGSGTDFTLTINNVQSEDLAEYFCQQFKSYPLTFGAGTKLELK

SEQ ID NO: 3 - protein, 10 aa, synthetic construct
GYSFTTYYIH

SEQ ID NO: 4 - protein, 17 aa, synthetic construct
WFFPGSGNIKYNEKFKG

SEQ ID NO: 5 - protein, 10 aa, synthetic construct
SYYSYDVLDY

SEQ ID NO: 6 - protein, 11 aa, synthetic construct
KASQNVGINVV

SEQ ID NO: 7 - protein, 7 aa, synthetic construct
SSSHRYS

SEQ ID NO: 8 - protein, 9 aa, synthetic construct
QQFKSYPLT

SEQ ID NO: 9 - protein, 119 aa, synthetic construct
QVQLVQSGAEVKKPGSSVKVSCKASGYSFTTYYIHWVRQAPGQGLEWMGWFFPGSGNIKYNEKFKGRVTITADTSTSTAYMELSSLRSEDTAVYYCAGSYYSYDVLDYWGQGTTVTVSS

SEQ ID NO: 10 - protein, 107 aa, synthetic construct
DIQMTQSPSFLSASVGDRVTITCKASQNVGINVVWHQQKPGKAPKALIYSSSHRYSGVPSRFSGSGSGTEFTLTISSLQPEDFATYFCQQFKSYPLTFGQGTKLEIK

SEQ ID NO: 11 - protein, 107 aa, synthetic construct
DIQMTQSPSSLSASVGDRVTITCKASQNVGINVVWHQQKPGKVPKALIYSSSHRYSGVPSRFSGSGSGTDFTLTISSLQPEDVATYFCQQFKSYPLTFGQGTKLEIK

SEQ ID NO: 12 - DNA, 357 bp, synthetic construct
  source 1..357: mol_type = other DNA
caggtgcagctggttcagtctggcgccgaagtgaagaaacctggctcctccgtgaaggtgtcctgcaaggcttccggctactccttcaccacctactacatccactgggtccgacaggcccctggacaaggattggaatggatgggctggttcttccccggctccggcaacatcaagtacaacgagaagttcaagggccgcgtgaccatcaccgccgacacctctacctctaccgcctacatggaactgtccagcctgagatctgaggacaccgccgtgtactactgcgccggctcctactactcttacgacgtgctggattactggggccagggcaccacagtgacagtgtcctct

SEQ ID NO: 13 - DNA, 321 bp, synthetic construct
  source 1..321: mol_type = other DNA
gacatccagatgacccagtctccatccttcctgtccgcctctgtgggcgacagagtgaccatcacatgcaaggcctctcagaacgtgggcatcaacgtcgtgtggcaccagcagaagcctggcaaggctcctaaggctctgatctactcctccagccaccggtactctggcgtgccctctagattttccggctctggctctggcaccgagtttaccctgacaatctccagcctgcagcctgaggacttcgccacctacttttgccagcagttcaagagctaccctctgacctttggccagggcaccaagctggaaatcaag

SEQ ID NO: 14 - DNA, 321 bp, synthetic construct
  source 1..321: mol_type = other DNA
gacatccagatgacccagtctccatcctctctgtccgcctctgtgggcgacagagtgaccatcacatgcaaggcctctcagaacgtgggcatcaacgtcgtgtggcaccagcagaaacctggcaaggtgcccaaggctctgatctactcctccagccacagatactccggcgtgccctctagattctccggctctggctctggcaccgactttaccctgacaatctccagcctgcagcctgaggacgtggccacctacttttgccagcagttcaagagctaccctctgacctttggccagggcaccaagctggaaatcaag

SEQ ID NO: 15 - protein, 117 aa, synthetic construct
DVQLVESGGGLVQPGGSRKLSCAASGFTFSNFGMHWVRQAPDKGLEWVAYISSGSSTIYYADTLKGRFTISRDNPKNTLFLQMTSLRSEDTAMYYCARRGEGAMDYWGQGTSVTVSS

SEQ ID NO: 16 - protein, 106 aa, synthetic construct
ENVLTQSPAIMSASLGEKVTMSCRASSSVNYIYWYQQKSDASPKLWIYYTSNLAPGVPTRFSGSGSGNSYSLTISSMEGEDAATYYCQQFTSSPFTFGSGTKLEIK

SEQ ID NO: 17 - protein, 10 aa, synthetic construct
GFTFSNFGMH

SEQ ID NO: 18 - protein, 17 aa, synthetic construct
YISSGSSTIYYADTLKG

SEQ ID NO: 19 - protein, 8 aa, synthetic construct
RGEGAMDY

SEQ ID NO: 20 - protein, 10 aa, synthetic construct
RASSSVNYIY

SEQ ID NO: 21 - protein, 7 aa, synthetic construct
YTSNLAP

SEQ ID NO: 22 - protein, 9 aa, synthetic construct
QQFTSSPFT

SEQ ID NO: 23 - protein, 117 aa, synthetic construct
QVQLVESGGGVVQPGRSLRLSCAASGFTFSNFGMHWVRQAPGKGLEWVAYISSGSSTIYYADTLKGRFTISRDNSKNTLYLQMNSLRAEDTAVYYCARRGEGAMDYWGQGTTVTVSS

SEQ ID NO: 24 - skipped

SEQ ID NO: 25 - protein, 117 aa, synthetic construct
EVQLVESGGGLVQPGGSLRLSCAASGFTFSNFGMHWVRQAPGKGLEWVSYISSGSSTIYYADTLKGRFTISRDNSKNTLYLQMNSLRAEDTAVYYCARRGEGAMDYWGQGTTVTVSS

SEQ ID NO: 26 - protein, 106 aa, synthetic construct
DNQLTQSPSFLSASVGDRVTITCRASSSVNYIYWYQQKPGKAPKLLIYYTSNLAPGVPSRFSGSGSGNEYTLTISSLQPEDFATYYCQQFTSSPFTFGQGTKLEIK

SEQ ID NO: 27 - protein, 106 aa, synthetic construct
DNQLTQSPSSLSASVGDRVTITCRASSSVNYIYWYQQKPGKAPKLLIYYTSNLAPGVPSRFSGSGSGNDYTLTISSLQPEDFATYYCQQFTSSPFTFGQGTKLEIK

SEQ ID NO: 28 - protein, 106 aa, synthetic construct
ENVLTQSPATLSVSPGERATLSCRASSSVNYIYWYQQKPGQAPRLLIYYTSNLAPGIPARFSGSGSGNEYTLTISSLQSEDFAVYYCQQFTSSPFTFGQGTKLEIK

SEQ ID NO: 29 - protein, 105 aa, synthetic construct
QNVLTQPPSASGTPGQRVTISCRASSSVNYIYWYQQLPGTAPKLLIYYTSNLAPGVPDRFSGSGSGNSYSLAISGLRSEDEADYYCQQFTSSPFTFGTGTKVTVL

SEQ ID NO: 30 - protein, 105 aa, synthetic construct
SNELTQPPSVSVSPGQTARITCRASSSVNYIYWYQQKSGQAPVLVIYYTSNLAPGIPERFSGSGSGNMYTLTISGAQVEDEADYYCQQFTSSPFTFGTGTKVTVL

SEQ ID NO: 31 - DNA, 351 bp, synthetic construct
  source 1..351: mol_type = other DNA
gaggtgcagctggttgaatctggcggaggattggttcagcctggcggctctctgagactgtcttgtgccgcttctggcttcaccttctccaacttcggcatgcactgggtccgacaggcccctggaaaaggactggaatgggtgtcctacatctcctccggctcctccaccatctactacgctgacaccctgaagggcagattcaccatctctcgggacaacgccaagaactccctgtacctgcagatgaacagcctgagagccgaggacaccgccgtgtactactgtgctagaagaggcgagggcgccatggattattggggccagggaaccacagtgaccgtgtctagc

SEQ ID NO: 32 - DNA, 351 bp, synthetic construct
  source 1..351: mol_type = other DNA
gaggtgcagctggttgaatctggcggaggattggttcagcctggcggctctctgagactgtcttgtgccgcttctggcttcaccttctccaacttcggcatgcactgggtccgacaggcccctggaaaaggactggaatgggtgtcctacatctcctccggctcctccaccatctactacgctgacaccctgaagggcagattcaccatcagccgggacaactccaagaacaccctgtacctgcagatgaactccctgagagccgaggacaccgccgtgtactactgtgctagaagaggcgagggcgccatggattattggggccagggaaccacagtgaccgtgtctagc

SEQ ID NO: 33 - DNA, 351 bp, synthetic construct
  source 1..351: mol_type = other DNA
caggtgcagctggtggaatctggtggcggagttgtgcagcctggcagatccctgagactgtcttgtgccgcctctggcttcaccttctccaacttcggcatgcactgggtccgacaggcccctggaaaaggattggagtgggtcgcctacatctcctccggctcctccaccatctactacgctgacaccctgaagggcagattcaccatcagccgggacaactccaagaacaccctgtacctgcagatgaactccctgagagccgaggacaccgccgtgtactactgtgctagaagaggcgagggcgccatggattattggggccagggaaccacagtgaccgtgtctagc

SEQ ID NO: 34 - DNA, 318 bp, synthetic construct
  source 1..318: mol_type = other DNA
gataaccagctgacccagtctcctagcttcctgtctgcctctgtgggcgacagagtgacaattacctgccgggcctcctcctccgtgaactacatctactggtatcagcagaagcccggcaaggcccctaagctgctgatctactacacctccaatctggcccctggcgtgccctctagattttccggatctggctccggcaacgagtataccctgacaatctccagcctgcagcctgaggacttcgccacctactactgccagcagttcacctcctctccattcacctttggccagggcaccaagctggaaatcaaa

SEQ ID NO: 35 - DNA, 317 bp, synthetic construct
  source 1..317: mol_type = other DNA
ataaccagctgacccagtctccttccagcctgtctgcttctgtgggcgacagagtgacaattacctgccgggcctcctcctccgtgaactacatctactggtatcagcagaagcccggcaaggcccctaagctgctgatctactacacctccaatctggcccctggcgtgccctctagattttccggatctggctccggcaacgactataccctgacaatctccagcctgcagcctgaggacttcgccacctactactgccagcagttcacctcctctccattcacctttggccagggcaccaagctggaaatcaaa

SEQ ID NO: 36 - DNA, 318 bp, synthetic construct
  source 1..318: mol_type = other DNA
gagaatgtgctgacccagtctcctgccacactgtctgttagccctggcgagagagctaccctgagctgcagagcctcttcctccgtgaactacatctactggtatcagcagaagcccggccaggctcctagactgctgatctactacacctccaatctggcccctggcatccctgccagattttccggatctggctccggcaacgagtataccctgaccatctccagcctgcagtccgaggactttgctgtgtactattgccagcagttcacaagcagccctttcacctttggccagggcaccaagctggaaatcaaa

SEQ ID NO: 37 - DNA, 315 bp, synthetic construct
  source 1..315: mol_type = other DNA
cagaatgtgctgacccaacctccttccgcctctggcacacctggacagagagtgacaatctcctgccgggcctcctcctccgtgaactacatctactggtatcagcagctgcccggcaccgctcctaaactgctgatctactacacctccaatctggcccctggcgtgcccgatagattttccggatctggctccggcaactcctacagcctggctatctctggcctgagatctgaggacgaggccgactactactgccagcagttcacctcctctccattcacctttggcaccggcaccaaagtgacagttctt

SEQ ID NO: 38 - DNA, 315 bp, synthetic construct
  source 1..315: mol_type = other DNA
tctaatgagctgacccagcctccttccgtgtccgtgtctcctggacagaccgccagaattacctgccgggcctcctcctccgtgaactacatctactggtatcagcagaagtccggccaggctcctgtgctcgtgatctactacacctccaatctggcccctggcatccctgagagattctccggatctggctccggcaacatgtacaccctgaccatctctggcgcccaggtggaagatgaggccgactactactgccagcagttcacctcctctccattcacctttggcaccggcaccaaagtgacagttctt

SEQ ID NO: 39 - protein, 107 aa, synthetic construct [sequence omitted]

SEQ ID NO: 40 - protein, 326 aa, synthetic construct
ASTKGPSVFPLAPCSRSTSESTAALGCLVKDYFPEPVTVSWNSGALTSGVHTFPAVLQSSGLYSLSSVVTVPSSSLGTKTYTCNVDHKPSNTKVDKRVESKYGPPCPPCPAPEFLGGPSVFLFPPKPKDTLMISRTPEVTCVVVDVSQEDPEVQFNWYVDGVEVHNAKTKPREEQFNSTYRVVSVLTVLHQDWLNGKEYKCKVSNKGLPSSIEKTISKAKGQPREPQVYTLPPSQEEMTKNQVSLTCLVKGFYPSDIAVEWESNGQPENNYKTTPPVLDSDGSFFLYSRLTVDKSRWQEGNVFSCSVMHEALHNHYTQKSLSLSLG

SEQ ID NO: 41 - protein, 330 aa, synthetic construct
ASTKGPSVFPLAPSSKSTSGGTAALGCLVKDYFPEPVTVSWNSGALTSGVHTFPAVLQSSGLYSLSSVVTVPSSSLGTQTYICNVNHKPSNTKVDKRVEPKSCDKTHTCPPCPAPELLGGPSVFLFPPKPKDTLMISRTPEVTCVVVDVSHEDPEVKFNWYVDGVEVHNAKTKPREEQYNSTYRVVSVLTVLHQDWLNGKEYKCKVSNKALPAPIEKTISKAKGQPREPQVYTLPPSREEMTKNQVSLTCLVKGFYPSDIAVEWESNGQPENNYKTTPPVLDSDGSFFLYSKLTVDKSRWQQGNVFSCSVMHEALHNHYTQKSLSLSPGK

SEQ ID NO: 42 - protein, 330 aa, synthetic construct
ASTKGPSVFPLAPSSKSTSGGTAALGCLVKDYFPEPVTVSWNSGALTSGVHTFPAVLQSSGLYSLSSVVTVPSSSLGTQTYICNVNHKPSNTKVDKRVEPKSCDKTHTCPPCPAPELLGGPSVFLFPPKPKDTLMISRTPEVTCVVVDVSHEDPEVKFNWYVDGVEVHNAKTKPREEQYASTYRVVSVLTVLHQDWLNGKEYKCKVSNKALPAPIEKTISKAKGQPREPQVYTLPPSREEMTKNQVSLTCLVKGFYPSDIAVEWESNGQPENNYKTTPPVLDSDGSFFLYSKLTVDKSRWQQGNVFSCSVMHEALHNHYTQKSLSLSPGK

SEQ ID NO: 43 - DNA, 344 bp, Homo sapiens
  source 1..344: mol_type = genomic DNA
atgagcatcggcctcctgtgctgtgcagccttgtctctcctgtgggcaggtccagtgaatgctggtgtcactcagaccccaaaattccaggtcctgaagacaggacagagcatgacactgcagtgtgcccaggatatgaaccatgaatacatgtcctggtatcgacaagacccaggcatggggctgaggctgattcattactcagttggtgctggtatcactgaccaaggagaagtccccaatggctacaatgtctccagatcaaccacagaggatttcccgctcaggctgctgtcggctgctccctcccagacatctgtgtacttctgtgccagcagttactc

SEQ ID NO: 44 - protein, 114 aa, Homo sapiens
MSIGLLCCAALSLLWAGPVNAGVTQTPKFQVLKTGQSMTLQCAQDMNHEYMSWYRQDPGMGLRLIHYSVGAGITDQGEVPNGYNVSRSTTEDFPLRLLSAAPSQTSVYFCASSY

SEQ ID NO: 45 - protein, 5 aa, synthetic construct
TYYIH

SEQ ID NO: 46 - protein, 17 aa, synthetic construct
WFFPGSGNIKYNEKFKG

SEQ ID NO: 47 - protein, 10 aa, synthetic construct
SYYSYDVLDY

SEQ ID NO: 48 - protein, 7 aa, synthetic construct
GYSFTTY

SEQ ID NO: 49 - protein, 6 aa, synthetic construct
FPGSGN

SEQ ID NO: 50 - protein, 10 aa, synthetic construct
SYYSYDVLDY

SEQ ID NO: 51 - protein, 11 aa, synthetic construct
KASQNVGINVV

SEQ ID NO: 52 - protein, 7 aa, synthetic construct
SSSHRYS

SEQ ID NO: 53 - protein, 9 aa, synthetic construct
QQFKSYPLT

SEQ ID NO: 54 - protein, 11 aa, synthetic construct
KASQNVGINVV

SEQ ID NO: 55 - protein, 7 aa, synthetic construct
SSSHRYS

SEQ ID NO: 56 - protein, 9 aa, synthetic construct
QQFKSYPLT

SEQ ID NO: 57 - protein, 5 aa, synthetic construct
NFGMH

SEQ ID NO: 58 - protein, 17 aa, synthetic construct
YISSGSSTIYYADTLKG

SEQ ID NO: 59 - protein, 8 aa, synthetic construct
RGEGAMDY

SEQ ID NO: 60 - protein, 7 aa, synthetic construct
GFTFSNF

SEQ ID NO: 61 - protein, 6 aa, synthetic construct
SSGSST

SEQ ID NO: 62 - protein, 8 aa, synthetic construct
RGEGAMDY

SEQ ID NO: 63 - protein, 10 aa, synthetic construct
RASSSVNYIY

SEQ ID NO: 64 - protein, 7 aa, synthetic construct
YTSNLAP

SEQ ID NO: 65 - protein, 9 aa, synthetic construct
QQFTSSPFT

SEQ ID NO: 66 - protein, 10 aa, synthetic construct
RASSSVNYIY

SEQ ID NO: 67 - protein, 7 aa, synthetic construct
YTSNLAP

SEQ ID NO: 68 - protein, 9 aa, synthetic construct
QQFTSSPFT

SEQ ID NO: 69 - protein, 592 aa, synthetic construct
METDTLLLWVLLLWVPGSTGQVQLVQSGAEVKKPGSSVKVSCKASGYSFTTYYIHWVRQAPGQGLEWMGWFFPGSGNIKYNEKFKGRVTITADTSTSTAYMELSSLRSEDTAVYYCAGSYYSYDVLDYWGQGTTVTVSSGSASAPTLFPLVSCENSPSDTSSVAVGCLAQDFLPDSITFSWKYKNNSDISSTRGFPSVLRGGKYAATSQVLLPSKDVMQGTDEHVVCKVQHPNGNKEKNVPLPVIAELPPKVSVFVPPRDGFFGNPRKSKLICQATGFSPRQIQVSWLREGKQVGSGVTTDQVQAEAKESGPTTYKVTSTLTIKESDWLGQSMFTCRVDHRGLTFQQNASSMCVPDQDTAIRVFAIPPSFASIFLTKSTKLTCLVTDLTTYDSVTISWTRQNGEAVKTHTNISESHPNATFSAVGEASICEDDWNSGERFTCTVTHTDLASSLKQTISRPKGVALHRPDVYLLPPAREQLNLRESATITCLVTGFSPADVFVQWMQRGQPLSPEKYVTSAPMPEPQAPGRYFAHSILTVSEEEWNTGETYTCVVAHEALPNRVTERTVDKSTGKPTLYNVSLVMSDTAGTCY

SEQ ID NO: 70 - protein, 492 aa, synthetic construct
METDTLLLWVLLLWVPGSTGQVQLVQSGAEVKKPGSSVKVSCKASGYSFTTYYIHWVRQAPGQGLEWMGWFFPGSGNIKYNEKFKGRVTITADTSTSTAYMELSSLRSEDTAVYYCAGSYYSYDVLDYWGQGTTVTVSSASPTSPKVFPLSLCSTQPDGNVVIACLVQGFFPQEPLSVTWSESGQGVTARNFPPSQDASGDLYTTSSQLTLPATQCLAGKSVTCHVKHYTNPSQDVTVPCPVPSTPPTPSPSTPPTPSPSCCHPRLSLHRPALEDLLLGSEANLTCTLTGLRDASGVTFTWTPSSGKSAVQGPPERDLCGCYSVSSVLPGCAEPWNHGKTFTCTAAYPESKTPLTATLSKSGNTFRPEVHLLPPPSEELALNELVTLTCLARGFSPKDVLVRWLQGSQELPREKYLTWASRQEPSQGTTTFAVTSILRVAAEDWKKGDTFSCMVGHEALPLAFTQKTIDRLAGKPTHVNVSVVMAEVDGTCY

SEQ ID NO: 71 - protein, 479 aa, synthetic construct
METDTLLLWVLLLWVPGSTGQVQLVQSGAEVKKPGSSVKVSCKASGYSFTTYYIHWVRQAPGQGLEWMGWFFPGSGNIKYNEKFKGRVTITADTSTSTAYMELSSLRSEDTAVYYCAGSYYSYDVLDYWGQGTTVTVSSASPTSPKVFPLSLDSTPQDGNVVVACLVQGFFPQEPLSVTWSESGQNVTARNFPPSQDASGDLYTTSSQLTLPATQCPDGKSVTCHVKHYTNSSQDVTVPCRVPPPPPCCHPRLSLHRPALEDLLLGSEANLTCTLTGLRDASGATFTWTPSSGKSAVQGPPERDLCGCYSVSSVLPGCAQPWNHGETFTCTAAHPELKTPLTANITKSGNTFRPEVHLLPPPSEELALNELVTLTCLARGFSPKDVLVRWLQGSQELPREKYLTWASRQEPSQGTTTYAVTSILRVAAEDWKKGETFSCMVGHEALPLAFTQKTIDRMAGKPTHINVSVVMAEADGTCY

SEQ ID NO: 72 - protein, 234 aa, synthetic construct
METDTLLLWVLLLWVPGSTGDIQMTQSPSFLSASVGDRVTITCKASQNVGINVVWHQQKPGKAPKALIYSSSHRYSGVPSRFSGSGSGTEFTLTISSLQPEDFATYFCQQFKSYPLTFGQGTKLEIKRTVAAPSVFIFPPSDEQLKSGTASVVCLLNNFYPREAKVQWKVDNALQSGNSQESVTEQDSKDSTYSLSSTLTLSKADYEKHKVYACEVTHQGLSSPVTKSFNRGEC

SEQ ID NO: 73 - protein, 453 aa, synthetic construct
GSASAPTLFPLVSCENSPSDTSSVAVGCLAQDFLPDSITFSWKYKNNSDISSTRGFPSVLRGGKYAATSQVLLPSKDVMQGTDEHVVCKVQHPNGNKEKNVPLPVIAELPPKVSVFVPPRDGFFGNPRKSKLICQATGFSPRQIQVSWLREGKQVGSGVTTDQVQAEAKESGPTTYKVTSTLTIKESDWLGQSMFTCRVDHRGLTFQQNASSMCVPDQDTAIRVFAIPPSFASIFLTKSTKLTCLVTDLTTYDSVTISWTRQNGEAVKTHTNISESHPNATFSAVGEASICEDDWNSGERFTCTVTHTDLASSLKQTISRPKGVALHRPDVYLLPPAREQLNLRESATITCLVTGFSPADVFVQWMQRGQPLSPEKYVTSAPMPEPQAPGRYFAHSILTVSEEEWNTGETYTCVVAHEALPNRVTERTVDKSTGKPTLYNVSLVMSDTAGTCY

SEQ ID NO: 74 - protein, 353 aa, synthetic construct
ASPTSPKVFPLSLCSTQPDGNVVIACLVQGFFPQEPLSVTWSESGQGVTARNFPPSQDASGDLYTTSSQLTLPATQCLAGKSVTCHVKHYTNPSQDVTVPCPVPSTPPTPSPSTPPTPSPSCCHPRLSLHRPALEDLLLGSEANLTCTLTGLRDASGVTFTWTPSSGKSAVQGPPERDLCGCYSVSSVLPGCAEPWNHGKTFTCTAAYPESKTPLTATLSKSGNTFRPEVHLLPPPSEELALNELVTLTCLARGFSPKDVLVRWLQGSQELPREKYLTWASRQEPSQGTTTFAVTSILRVAAEDWKKGDTFSCMVGHEALPLAFTQKTIDRLAGKPTHVNVSVVMAEVDGTCY

SEQ ID NO: 75 - protein, 340 aa, synthetic construct
ASPTSPKVFPLSLDSTPQDGNVVVACLVQGFFPQEPLSVTWSESGQNVTARNFPPSQDASGDLYTTSSQLTLPATQCPDGKSVTCHVKHYTNSSQDVTVPCRVPPPPPCCHPRLSLHRPALEDLLLGSEANLTCTLTGLRDASGATFTWTPSSGKSAVQGPPERDLCGCYSVSSVLPGCAQPWNHGETFTCTAAHPELKTPLTANITKSGNTFRPEVHLLPPPSEELALNELVTLTCLARGFSPKDVLVRWLQGSQELPREKYLTWASRQEPSQGTTTYAVTSILRVAAEDWKKGETFSCMVGHEALPLAFTQKTIDRMAGKPTHINVSVVMAEADGTCY

SEQ ID NO: 76 - protein, 159 aa, synthetic construct
MKNHLLFWGVLAVFIKAVHVKAQEDERIVLVDNKCKCARITSRIIRSSEDPNEDIVERNIRIIVPLNNRENISDPTSPLRTRFVYHLSDLCKKCDPTEVELDNQIVTATQSNICDEDSATETCYTYDRNKCYTAVVPLVYGGETKMVETALTPDACYPD

SEQ ID NO: 77 - protein, 24 aa, synthetic construct
AEAAAKEAAAKEAAAKEAAAKAAA

SEQ ID NO: 78 - protein, 29 aa, synthetic construct
AEAAAKEAAAKEAAAKEAAAKEAAAKAAA

SEQ ID NO: 79 - skipped

SEQ ID NO: 80 - protein, 246 aa, synthetic construct
QVQLVQSGAEVKKPGSSVKVSCKASGTDFKLTYIHWVRQAPGQGLEWMGRVSPGSGNTKYNEKFKGRVTITADTSTSTAYMELSSLRSEDTAVYYCAGSYYSYDVLDYWGQGTTVTVSSGGGGSGGGGSGGGGSGGGGSDIQMTQSPSFLSASVGDRVTITCKASQNVEDRVAWYQQKPGKAPKALIYSSSHRYKGVPSRFSGSGSGTEFTLTISSLQPEDFATYFCQQFKSYPLTFGQGTKLEIK

SEQ ID NO: 81 - protein, 107 aa, synthetic construct
DIQMTQSPSFLSASVGDRVTITCKASQNVEDRVAWYQQKPGKAPKALIYSSSHRYKGVPSRFSGSGSGTEFTLTISSLQPEDFATYFCQQFKSYPLTFGQGTKLEIK

SEQ ID NO: 82 - protein, 119 aa, synthetic construct
QVQLVQSGAEVKKPGSSVKVSCKASGTDFKLTYIHWVRQAPGQGLEWMGRVSPGSGNTKYNEKFKGRVTITADTSTSTAYMELSSLRSEDTAVYYCAGSYYSYDVLDYWGQGTTVTVSS

SEQ ID NO: 83 - protein, 246 aa, synthetic construct
QVQLVQSGAEVKKPGSSVKVSCKASGTDFDKIYIHWVRQAPGQGLEWMGRISAGSGNVKYNEKFKGRVTITADTSTSTAYMELSSLRSEDTAVYYCAGSYYSYDVLDYWGQGTTVTVSSGGGGSGGGGSGGGGSGGGGSDIQMTQSPSFLSASVGDRVTITCKASQNVEDRVAWYQQKPGKAPKALIYSSSHRYKGVPSRFSGSGSGTEFTLTISSLQPEDFATYFCQQFKSYPLTFGQGTKLEIK

SEQ ID NO: 84 - protein, 107 aa, synthetic construct; identical to SEQ ID NO: 81

SEQ ID NO: 85 - protein, 119 aa, synthetic construct
QVQLVQSGAEVKKPGSSVKVSCKASGTDFDKIYIHWVRQAPGQGLEWMGRISAGSGNVKYNEKFKGRVTITADTSTSTAYMELSSLRSEDTAVYYCAGSYYSYDVLDYWGQGTTVTVSS

SEQ ID NO: 86 - protein, 246 aa, synthetic construct
QVQLVQSGAEVKKPGSSVKVSCKASGHDFRDFYIHWVRQAPGQGLEWMGRVYPGSGSYRYNEKFKGRVTITADTSTSTAYMELSSLRSEDTAVYYCAGSYYSYDVLDYWGQGTTVTVSSGGGGSGGGGSGGGGSGGGGSDIQMTQSPSFLSASVGDRVTITCKASQNVDDRVAWYQQKPGKAPKALIYSSSHRYKGVPSRFSGSGSGTEFTLTISSLQPEDFATYFCQQFKSYPLTFGQGTKLEIK

SEQ ID NO: 87 - protein, 107 aa, synthetic construct
DIQMTQSPSFLSASVGDRVTITCKASQNVDDRVAWYQQKPGKAPKALIYSSSHRYKGVPSRFSGSGSGTEFTLTISSLQPEDFATYFCQQFKSYPLTFGQGTKLEIK

SEQ ID NO: 88 - protein, 119 aa, synthetic construct
QVQLVQSGAEVKKPGSSVKVSCKASGHDFRDFYIHWVRQAPGQGLEWMGRVYPGSGSYRYNEKFKGRVTITADTSTSTAYMELSSLRSEDTAVYYCAGSYYSYDVLDYWGQGTTVTVSS

SEQ ID NO: 89 - protein, 246 aa, synthetic construct
QVQLVQSGAEVKKPGSSVKVSCKASGHDFKLTYIHWVRQAPGQGLEWMGRISAGSGNVKYNEKFKGRVTITADTSTSTAYMELSSLRSEDTAVYYCAGSYYSYDVLDYWGQGTTVTVSSGGGGSGGGGSGGGGSGGGGSDIQMTQSPSFLSASVGDRVTITCKASQNVDNRVAWYQQKPGKAPKALIYSSSHRYKGVPSRFSGSGSGTEFTLTISSLQPEDFATYFCQQFKSYPLTFGQGTKLEIK

SEQ ID NO: 90 - protein, 107 aa, synthetic construct
DIQMTQSPSFLSASVGDRVTITCKASQNVDNRVAWYQQKPGKAPKALIYSSSHRYKGVPSRFSGSGSGTEFTLTISSLQPEDFATYFCQQFKSYPLTFGQGTKLEIK

SEQ ID NO: 91 - protein, 119 aa, synthetic construct
QVQLVQSGAEVKKPGSSVKVSCKASGHDFKLTYIHWVRQAPGQGLEWMGRISAGSGNVKYNEKFKGRVTITADTSTSTAYMELSSLRSEDTAVYYCAGSYYSYDVLDYWGQGTTVTVSS

SEQ ID NO: 92 - protein, 246 aa, synthetic construct
QVQLVQSGAEVKKPGSSVKVSCKASGTDFKLTYIHWVRQAPGQGLEWMGRIFPGSGNVKYNEKFKGRVTITADTSTSTAYMELSSLRSEDTAVYYCAGSYYSYDVLDYWGQGTTVTVSSGGGGSGGGGSGGGGSGGGGSDIQMTQSPSFLSASVGDRVTITCKASQNVENKVAWHQQKPGKAPKALIYSSSHRYKGVPSRFSGSGSGTEFTLTISSLQPEDFATYFCQQFKSYPLTFGQGTKLEIK

SEQ ID NO: 93 - protein, 107 aa, synthetic construct
DIQMTQSPSFLSASVGDRVTITCKASQNVENKVAWHQQKPGKAPKALIYSSSHRYKGVPSRFSGSGSGTEFTLTISSLQPEDFATYFCQQFKSYPLTFGQGTKLEIK

SEQ ID NO: 94 - protein, 119 aa, synthetic construct
QVQLVQSGAEVKKPGSSVKVSCKASGTDFKLTYIHWVRQAPGQGLEWMGRIFPGSGNVKYNEKFKGRVTITADTSTSTAYMELSSLRSEDTAVYYCAGSYYSYDVLDYWGQGTTVTVSS

SEQ ID NO: 95 - protein, 246 aa, synthetic construct
QVQLVQSGAEVKKPGSSVKVSCKASGTDFDKIYIHWVRQAPGQGLEWMGRIFAGSGNTKYNEKFKGRVTITADTSTSTAYMELSSLRSEDTAVYYCAGSYYSYDVLDYWGQGTTVTVSSGGGGSGGGGSGGGGSGGGGSDIQMTQSPSFLSASVGDRVTITCKASQNVDDRVAWYQQKPGKAPKALIYSSSHRYKGVPSRFSGSGSGTEFTLTISSLQPEDFATYFCQQFKSYPLTFGQGTKLEIK

SEQ ID NO: 96 - protein, 107 aa, synthetic construct; identical to SEQ ID NO: 87

SEQ ID NO: 97 - protein, 119 aa, synthetic construct
QVQLVQSGAEVKKPGSSVKVSCKASGTDFDKIYIHWVRQAPGQGLEWMGRIFAGSGNTKYNEKFKGRVTITADTSTSTAYMELSSLRSEDTAVYYCAGSYYSYDVLDYWGQGTTVTVSS

SEQ ID NO: 98 - protein, 246 aa, synthetic construct
QVQLVQSGAEVKKPGSSVKVSCKASGHDFDKFYIHWVRQAPGQGLEWMGRVSAGSGNVKYNEKFKGRVTITADTSTSTAYMELSSLRSEDTAVYYCAGSYYSYDVLDYWGQGTTVTVSSGGGGSGGGGSGGGGSGGGGSDIQMTQSPSFLSASVGDRVTITCKASQNVGNRVAWYQQKPGKAPKALIYSSSHRYSGVPSRFSGSGSGTEFTLTISSLQPEDFATYFCQQFKSYPLTFGQGTKLEIK

SEQ ID NO: 99 - protein, 107 aa, synthetic construct
DIQMTQSPSFLSASVGDRVTITCKASQNVGNRVAWYQQKPGKAPKALIYSSSHRYSGVPSRFSGSGSGTEFTLTISSLQPEDFATYFCQQFKSYPLTFGQGTKLEIK

SEQ ID NO: 100 - protein, 119 aa, synthetic construct
QVQLVQSGAEVKKPGSSVKVSCKASGHDFDKFYIHWVRQAPGQGLEWMGRVSAGSGNVKYNEKFKGRVTITADTSTSTAYMELSSLRSEDTAVYYCAGSYYSYDVLDYWGQGTTVTVSS

SEQ ID NO: 101 - protein, 247 aa, synthetic construct
QVQLVQSGAEVKKPGSSVKVSCKASGHDFDKFYIHWVRQAPGQGLEWMGRIFAGSGNVKYNEKFKGRVTITADTSTSTAYMELSSLRSEDTAVYYCAGSYYSYDVLDYWGQGTTVTVSSGGGGSGGGGSGGGGSGGGGSDIQMTQSPSFLSASVGDRVTITCKASQNVGDRVAWYQQKPGKAPKALIYSSSHRYKGVPSRFSGSGSGTEFTLTISSLQPEDFATYFCQQFKSYPLTFGQGTKLEIKS

SEQ ID NO: 102 - protein, 107 aa, synthetic construct
DIQMTQSPSFLSASVGDRVTITCKASQNVGDRVAWYQQKPGKAPKALIYSSSHRYKGVPSRFSGSGSGTEFTLTISSLQPEDFATYFCQQFKSYPLTFGQGTKLEIK

SEQ ID NO: 103 - protein, 119 aa, synthetic construct
QVQLVQSGAEVKKPGSSVKVSCKASGHDFDKFYIHWVRQAPGQGLEWMGRIFAGSGNVKYNEKFKGRVTITADTSTSTAYMELSSLRSEDTAVYYCAGSYYSYDVLDYWGQGTTVTVSS

SEQ ID NO: 104 - protein, 246 aa, synthetic construct
QVQLVQSGAEVKKPGSSVKVSCKASGTDFKLTYIHWVRQAPGQGLEWMGRVSPGSGNVKYNEKFKGRVTITADTSTSTAYMELSSLRSEDTAVYYCAGSYYSYDVLDYWGQGTTVTVSSGGGGSGGGGSGGGGSGGGGSDIQMTQSPSFLSASVGDRVTITCKASQNVGDRVAWYQQKPGKAPKALIYSSSHRYKGVPSRFSGSGSGTEFTLTISSLQPEDFATYFCQQFKSYPLTFGQGTKLEIK

SEQ ID NO: 105 - protein, 107 aa, synthetic construct; identical to SEQ ID NO: 102

SEQ ID NO: 106 - protein, 119 aa, synthetic construct
QVQLVQSGAEVKKPGSSVKVSCKASGTDFKLTYIHWVRQAPGQGLEWMGRVSPGSGNVKYNEKFKGRVTITADTSTSTAYMELSSLRSEDTAVYYCAGSYYSYDVLDYWGQGTTVTVSS

SEQ ID NO: 107 - protein, 246 aa, synthetic construct
QVQLVQSGAEVKKPGSSVKVSCKASGTDFDKIYIHWVRQAPGQGLEWMGRVSAGSGNTKYNEKFKGRVTITADTSTSTAYMELSSLRSEDTAVYYCAGSYYSYDVLDYWGQGTTVTVSSGGGGSGGGGSGGGGSGGGGSDIQMTQSPSFLSASVGDRVTITCKASQNVGNRVAWYQQKPGKAPKALIYSSSHRYKGVPSRFSGSGSGTEFTLTISSLQPEDFATYFCQQFKSYPLTFGQGTKLEIK

SEQ ID NO: 108 - protein, 107 aa, synthetic construct
DIQMTQSPSFLSASVGDRVTITCKASQNVGNRVAWYQQKPGKAPKALIYSSSHRYKGVPSRFSGSGSGTEFTLTISSLQPEDFATYFCQQFKSYPLTFGQGTKLEIK

SEQ ID NO: 109 - protein, 119 aa, synthetic construct
QVQLVQSGAEVKKPGSSVKVSCKASGTDFDKIYIHWVRQAPGQGLEWMGRVSAGSGNTKYNEKFKGRVTITADTSTSTAYMELSSLRSEDTAVYYCAGSYYSYDVLDYWGQGTTVTVSS

SEQ ID NO: 110 - protein, 246 aa, synthetic construct
QVQLVQSGAEVKKPGSSVKVSCKASGTDFKLTYIHWVRQAPGQGLEWMGRIFPGSGNVKYNEKFKGRVTITADTSTSTAYMELSSLRSEDTAVYYCAGSYYSYDVLDYWGQGTTVTVSSGGGGSGGGGSGGGGSGGGGSDIQMTQSPSFLSASVGDRVTITCKASQNVDNRVAWYQQKPGKAPKALIYSSSHRYKGVPSRFSGSGSGTEFTLTISSLQPEDFATYFCQQFKSYPLTFGQGTKLEIK

SEQ ID NO: 111 - protein, 107 aa, synthetic construct; identical to SEQ ID NO: 90

SEQ ID NO: 112 - protein, 119 aa, synthetic construct; identical to SEQ ID NO: 94

SEQ ID NO: 113 - protein, 246 aa, synthetic construct
QVQLVQSGAEVKKPGSSVKVSCKASGTDFDKIYIHWVRQAPGQGLEWMGRISAGSGNTKYNEKFKGRVTITADTSTSTAYMELSSLRSEDTAVYYCAGSYYSYDVLDYWGQGTTVTVSSGGGGSGGGGSGGGGSGGGGSDIQMTQSPSFLSASVGDRVTITCKASQNVDDRVAWYQQKPGKAPKALIYSSSHRYKGVPSRFSGSGSGTEFTLTISSLQPEDFATYFCQQFKSYPLTFGQGTKLEIK

SEQ ID NO: 114 - protein, 107 aa, synthetic construct; identical to SEQ ID NO: 87

SEQ ID NO: 115 - protein, 119 aa, synthetic construct
QVQLVQSGAEVKKPGSSVKVSCKASGTDFDKIYIHWVRQAPGQGLEWMGRISAGSGNTKYNEKFKGRVTITADTSTSTAYMELSSLRSEDTAVYYCAGSYYSYDVLDYWGQGTTVTVSS

SEQ ID NO: 116 - protein, 246 aa, synthetic construct
QVQLVQSGAEVKKPGSSVKVSCKASGTDFRLTYIHWVRQAPGQGLEWMGRVSPGSGNTKYNEKFKGRVTITADTSTSTAYMELSSLRSEDTAVYYCAGSYYSYDVLDYWGQGTTVTVSSGGGGSGGGGSGGGGSGGGGSDIQMTQSPSFLSASVGDRVTITCKASQNVDNKVAWHQQKPGKAPKALIYSSSHRYKGVPSRFSGSGSGTEFTLTISSLQPEDFATYFCQQFKSYPLTFGQGTKLEIK

SEQ ID NO: 117 - protein, 107 aa, synthetic construct
DIQMTQSPSFLSASVGDRVTITCKASQNVDNKVAWHQQKPGKAPKALIYSSSHRYKGVPSRFSGSGSGTEFTLTISSLQPEDFATYFCQQFKSYPLTFGQGTKLEIK

SEQ ID NO: 118 - protein, 119 aa, synthetic construct
QVQLVQSGAEVKKPGSSVKVSCKASGTDFRLTYIHWVRQAPGQGLEWMGRVSPGSGNTKYNEKFKGRVTITADTSTSTAYMELSSLRSEDTAVYYCAGSYYSYDVLDYWGQGTTVTVSS

SEQ ID NO: 119 - protein, 246 aa, synthetic construct
QVQLVQSGAEVKKPGSSVKVSCKASGGTFRLTYIHWVRQAPGQGLEWMGRVYPGSGNTKYNEKFKGRVTITADTSTSTAYMELSSLRSEDTAVYYCAGSYYSYDVLDYWGQGTTVTVSSGGGGSGGGGSGGGGSGGGGSDIQMTQSPSFLSASVGDRVTITCKASQNVDDRVAWYQQKPGKAPKALIYSSSHRYKGVPSRFSGSGSGTEFTLTISSLQPEDFATYFCQQFKSYPLTFGQGTKLEIK

SEQ ID NO: 120 - protein, 107 aa, synthetic construct; identical to SEQ ID NO: 87

SEQ ID NO: 121 - protein, 119 aa, synthetic construct
QVQLVQSGAEVKKPGSSVKVSCKASGGTFRLTYIHWVRQAPGQGLEWMGRVYPGSGNTKYNEKFKGRVTITADTSTSTAYMELSSLRSEDTAVYYCAGSYYSYDVLDYWGQGTTVTVSS

SEQ ID NO: 122 - protein, 246 aa, synthetic construct
QVQLVQSGAEVKKPGSSVKVSCKASGTDFRLTYIHWVRQAPGQGLEWMGRIFPGSGNTKYNEKFKGRVTITADTSTSTAYMELSSLRSEDTAVYYCAGSYYSYDVLDYWGQGTTVTVSSGGGGSGGGGSGGGGSGGGGSDIQMTQSPSFLSASVGDRVTITCKASQNVDDRVAWYQQKPGKAPKALIYSSSHRYKGVPSRFSGSGSGTEFTLTISSLQPEDFATYFCQQFKSYPLTFGQGTKLEIK

SEQ ID NO: 123 - protein, 107 aa, synthetic construct; identical to SEQ ID NO: 87

SEQ ID NO: 124 - protein, 119 aa, synthetic construct
QVQLVQSGAEVKKPGSSVKVSCKASGTDFRLTYIHWVRQAPGQGLEWMGRIFPGSGNTKYNEKFKGRVTITADTSTSTAYMELSSLRSEDTAVYYCAGSYYSYDVLDYWGQGTTVTVSS

SEQ ID NO: 125 - protein, 246 aa, synthetic construct
QVQLVQSGAEVKKPGSSVKVSCKASGTDFKLTYIHWVRQAPGQGLEWMGRIFPGSGNVKYNEKFKGRVTITADTSTSTAYMELSSLRSEDTAVYYCAGSYYSYDVLDYWGQGTTVTVSSGGGGSGGGGSGGGGSGGGGSDIQMTQSPSFLSASVGDRVTITCKASQNVEDRVAWYQQKPGKAPKALIYSSSHRYKGVPSRFSGSGSGTEFTLTISSLQPEDFATYFCQQFKSYPLTFGQGTKLEIK

SEQ ID NO: 126 - protein, 107 aa, synthetic construct; identical to SEQ ID NO: 81

SEQ ID NO: 127 - protein, 119 aa, synthetic construct; identical to SEQ ID NO: 94

SEQ ID NO: 128 - protein, 246 aa, synthetic construct
QVQLVQSGAEVKKPGSSVKVSCKASGGTFRLTYIHWVRQAPGQGLEWMGRISAGSGNVKYNEKFKGRVTITADTSTSTAYMELSSLRSEDTAVYYCAGSYYSYDVLDYWGQGTTVTVSSGGGGSGGGGSGGGGSGGGGSDIQMTQSPSFLSASVGDRVTITCKASQNVGDRVAWYQQKPGKAPKALIYSSSHRYKGVPSRFSGSGSGTEFTLTISSLQPEDFATYFCQQFKSYPLTFGQGTKLEIK

SEQ ID NO: 129 - protein, 107 aa, synthetic construct; identical to SEQ ID NO: 102

SEQ ID NO: 130 - protein, 119 aa, synthetic construct
QVQLVQSGAEVKKPGSSVKVSCKASGGTFRLTYIHWVRQAPGQGLEWMGRISAGSGNVKYNEKFKGRVTITADTSTSTAYMELSSLRSEDTAVYYCAGSYYSYDVLDYWGQGTTVTVSS

SEQ ID NO: 131 - protein, 246 aa, synthetic construct
QVQLVQSGAEVKKPGSSVKVSCKASGGTFDKTYIHWVRQAPGQGLEWMGRISAGSGNTKYNEKFKGRVTITADTSTSTAYMELSSLRSEDTAVYYCAGSYYSYDVLDYWGQGTTVTVSSGGGGSGGGGSGGGGSGGGGSDIQMTQSPSFLSASVGDRVTITCKASQNVDDRVAWYQQKPGKAPKALIYSSSHRYKGVPSRFSGSGSGTEFTLTISSLQPEDFATYFCQQFKSYPLTFGQGTKLEIK

SEQ ID NO: 132 - protein, 107 aa, synthetic construct; identical to SEQ ID NO: 87

SEQ ID NO: 133 - protein, 119 aa, synthetic construct
QVQLVQSGAEVKKPGSSVKVSCKASGGTFDKTYIHWVRQAPGQGLEWMGRISAGSGNTKYNEKFKGRVTITADTSTSTAYMELSSLRSEDTAVYYCAGSYYSYDVLDYWGQGTTVTVSS

SEQ ID NO: 134 - protein, 246 aa, synthetic construct
QVQLVQSGAEVKKPGSSVKVSCKASGHDFDKFYIHWVRQAPGQGLEWMGRISAGSGNTKYNEKFKGRVTITADTSTSTAYMELSSLRSEDTAVYYCAGSYYSYDVLDYWGQGTTVTVSSGGGGSGGGGSGGGGSGGGGSDIQMTQSPSFLSASVGDRVTITCKASQNVDDRVAWYQQKPGKAPKALIYSSSHRYKGVPSRFSGSGSGTEFTLTISSLQPEDFATYFCQQFKSYPLTFGQGTKLEIK

SEQ ID NO: 135 - protein, 107 aa, synthetic construct; identical to SEQ ID NO: 87

SEQ ID NO: 136 - protein, 119 aa, synthetic construct
QVQLVQSGAEVKKPGSSVKVSCKASGHDFDKFYIHWVRQAPGQGLEWMGRISAGSGNTKYNEKFKGRVTITADTSTSTAYMELSSLRSEDTAVYYCAGSYYSYDVLDYWGQGTTVTVSS

SEQ ID NO: 137 - protein, 246 aa, synthetic construct
QVQLVQSGAEVKKPGSSVKVSCKASGTDFKLTYIHWVRQAPGQGLEWMGRISAGSGNVKYNEKFKGRVTITADTSTSTAYMELSSLRSEDTAVYYCAGSYYSYDVLDYWGQGTTVTVSSGGGGSGGGGSGGGGSGGGGSDIQMTQSPSFLSASVGDRVTITCKASQNVDNKVAWHQQKPGKAPKALIYSSSHRYKGVPSRFSGSGSGTEFTLTISSLQPEDFATYFCQQFKSYPLTFGQGTKLEIK

SEQ ID NO: 138 - protein, 107 aa, synthetic construct; identical to SEQ ID NO: 117

SEQ ID NO: 139 - protein, 119 aa, synthetic construct
QVQLVQSGAEVKKPGSSVKVSCKASGTDFKLTYIHWVRQAPGQGLEWMGRISAGSGNVKYNEKFKGRVTITADTSTSTAYMELSSLRSEDTAVYYCAGSYYSYDVLDYWGQGTTVTVSS

SEQ ID NO: 140 - protein, 246 aa, synthetic construct
QVQLVQSGAEVKKPGSSVKVSCKASGHDFRLTYIHWVRQAPGQGLEWMGRISAGSGNVKYNEKFKGRVTITADTSTSTAYMELSSLRSEDTAVYYCAGSYYSYDVLDYWGQGTTVTVSSGGGGSGGGGSGGGGSGGGGSDIQMTQSPSFLSASVGDRVTITCKASQNVADRVAWYQQKPGKAPKALIYSSSHRYKGVPSRFSGSGSGTEFTLTISSLQPEDFATYFCQQFKSYPLTFGQGTKLEIK

SEQ ID NO: 141 - protein, 107 aa, synthetic construct
DIQMTQSPSFLSASVGDRVTITCKASQNVADRVAWYQQKPGKAPKALIYSSSHRYKGVPSRFSGSGSGTEFTLTISSLQPEDFATYFCQQFKSYPLTFGQGTKLEIK

SEQ ID NO: 142 - protein, 119 aa, synthetic construct
QVQLVQSGAEVKKPGSSVKVSCKASGHDFRLTYIHWVRQAPGQGLEWMGRISAGSGNVKYNEKFKGRVTITADTSTSTAYMELSSLRSEDTAVYYCAGSYYSYDVLDYWGQGTTVTVSS

SEQ ID NO: 143 - protein, 246 aa, synthetic construct
QVQLVQSGAEVKKPGSSVKVSCKASGHDFHLWYIHWVRQAPGQGLEWMGRVSAGSGNVKYNEKFKGRVTITADTSTSTAYMELSSLRSEDTAVYYCAGSYYSYDVLDYWGQGTTVTVSSGGGGSGGGGSGGGGSGGGGSDIQMTQSPSFLSASVGDRVTITCKASQNVDNKVAWHQQKPGKAPKALIYSSSHRYKGVPSRFSGSGSGTEFTLTISSLQPEDFATYFCQQFKSYPLTFGQGTKLEIK

SEQ ID NO: 144 - protein, 107 aa, synthetic construct; identical to SEQ ID NO: 117

SEQ ID NO: 145 - protein, 119 aa, synthetic construct
QVQLVQSGAEVKKPGSSVKVSCKASGHDFHLWYIHWVRQAPGQGLEWMGRVSAGSGNVKYNEKFKGRVTITADTSTSTAYMELSSLRSEDTAVYYCAGSYYSYDVLDYWGQGTTVTVSS

SEQ ID NO: 146 - protein, 246 aa, synthetic construct
QVQLVQSGAEVKKPGSSVKVSCKASGHDFHLWYIHWVRQAPGQGLEWMGRVFAGSGNTKYNEKFKGRVTITADTSTSTAYMELSSLRSEDTAVYYCAGSYYSYDVLDYWGQGTTVTVSSGGGGSGGGGSGGGGSGGGGSDIQMTQSPSFLSASVGDRVTITCKASQNVEDKVAWYQQKPGKAPKALIYSSSHRYKGVPSRFSGSGSGTEFTLTISSLQPEDFATYFCQQFKSYPLTFGQGTKLEIK

SEQ ID NO: 147 - protein, 107 aa, synthetic construct
DIQMTQSPSFLSASVGDRVTITCKASQNVEDKVAWYQQKPGKAPKALIYSSSHRYKGVPSRFSGSGSGTEFTLTISSLQPEDFATYFCQQFKSYPLTFGQGTKLEIK

SEQ ID NO: 148 - protein, 119 aa, synthetic construct
QVQLVQSGAEVKKPGSSVKVSCKASGHDFHLWYIHWVRQAPGQGLEWMGRVFAGSGNTKYNEKFKGRVTITADTSTSTAYMELSSLRSEDTAVYYCAGSYYSYDVLDYWGQGTTVTVSS

SEQ ID NO: 149 - protein, 246 aa, synthetic construct
QVQLVQSGAEVKKPGSSVKVSCKASGTDFKLTYIHWVRQAPGQGLEWMGRIFPGSGNTKYNEKFKGRVTITADTSTSTAYMELSSLRSEDTAVYYCAGSYYSYDVLDYWGQGTTVTVSSGGGGSGGGGSGGGGSGGGGSDIQMTQSPSFLSASVGDRVTITCKASQNVDDRVAWYQQKPGKAPKALIYSSSHRYKGVPSRFSGSGSGTEFTLTISSLQPEDFATYFCQQFKSYPLTFGQGTKLEIK

SEQ ID NO: 150 - protein, 107 aa, synthetic construct; identical to SEQ ID NO: 87

SEQ ID NO: 151 - protein, 119 aa, synthetic construct
QVQLVQSGAEVKKPGSSVKVSCKASGTDFKLTYIHWVRQAPGQGLEWMGRIFPGSGNTKYNEKFKGRVTITADTSTSTAYMELSSLRSEDTAVYYCAGSYYSYDVLDYWGQGTTVTVSS

SEQ ID NO: 152 - skipped

SEQ ID NO: 153 - protein, 246 aa, synthetic construct
QVQLVQSGAEVKKPGSSVKVSCKASGTDFKLTYIHWVRQAPGQGLEWMGRVSAGSGNVKYNEKFKGRVTITADTSTSTAYMELSSLRSEDTAVYYCAGSYYSYDVLDYWGQGTTVTVSSGGGGSGGGGSGGGGSGGGGSDIQMTQSPSFLSASVGDRVTITCKASQNVGNRVAWYQQKPGKAPKALIYSSSHRYKGVPSRFSGSGSGTEFTLTISSLQPEDFATYFCQQFKSYPLTFGQGTKLEIK

SEQ ID NO: 154 - skipped

SEQ ID NO: 155 - protein, 119 aa, synthetic construct
QVQLVQSGAEVKKPGSSVKVSCKASGTDFKLTYIHWVRQAPGQGLEWMGRVSAGSGNVKYNEKFKGRVTITADTSTSTAYMELSSLRSEDTAVYYCAGSYYSYDVLDYWGQGTTVTVSS

SEQ ID NO: 156 - protein, 246 aa, synthetic construct
QVQLVQSGAEVKKPGSSVKVSCKASGTDFKLTYIHWVRQAPGQGLEWMGRISPGSGNTKYNEKFKGRVTITADTSTSTAYMELSSLRSEDTAVYYCAGSYYSYDVLDYWGQGTTVTVSSGGGGSGGGGSGGGGSGGGGSDIQMTQSPSFLSASVGDRVTITCKASQNVGDRVAWYQQKPGKAPKALIYSSSHRYKGVPSRFSGSGSGTEFTLTISSLQPEDFATYFCQQFKSYPLTFGQGTKLEIK

SEQ ID NO: 157 - protein, 107 aa, synthetic construct; identical to SEQ ID NO: 102

SEQ ID NO: 158 - protein, 119 aa, synthetic construct
QVQLVQSGAEVKKPGSSVKVSCKASGTDFKLTYIHWVRQAPGQGLEWMGRISPGSGNTKYNEKFKGRVTITADTSTSTAYMELSSLRSEDTAVYYCAGSYYSYDVLDYWGQGTTVTVSS

SEQ ID NO: 159 - protein, 246 aa, synthetic construct
QVQLVQSGAEVKKPGSSVKVSCKASGHDFHLWYIHWVRQAPGQGLEWMGRISPGSGNVKYNEKFKGRVTITADTSTSTAYMELSSLRSEDTAVYYCAGSYYSYDVLDYWGQGTTVTVSSGGGGSGGGGSGGGGSGGGGSDIQMTQSPSFLSASVGDRVTITCKASQNVGDRVAWHQQKPGKAPKALIYSSSHRYKGVPSRFSGSGSGTEFTLTISSLQPEDFATYFCQQFKSYPLTFGQGTKLEIK

SEQ ID NO: 160 - protein, 107 aa, synthetic construct
DIQMTQSPSFLSASVGDRVTITCKASQNVGDRVAWHQQKPGKAPKALIYSSSHRYKGVPSRFSGSGSGTEFTLTISSLQPEDFATYFCQQFKSYPLTFGQGTKLEIK

SEQ ID NO: 161 - protein, 119 aa, synthetic construct
QVQLVQSGAEVKKPGSSVKVSCKASGHDFHLWYIHWVRQAPGQGLEWMGRISPGSGNVKYNEKFKGRVTITADTSTSTAYMELSSLRSEDTAVYYCAGSYYSYDVLDYWGQGTTVTVSS

SEQ ID NO: 162 - protein, 246 aa, synthetic construct
QVQLVQSGAEVKKPGSSVKVSCKASGHDFKLTYIHWVRQAPGQGLEWMGRISAGSGNVKYNEKFKGRVTITADTSTSTAYMELSSLRSEDTAVYYCAGSYYSYDVLDYWGQGTTVTVSSGGGGSGGGGSGGGGSGGGGSDIQMTQSPSFLSASVGDRVTITCKASQNVDDRVAWYQQKPGKAPKALIYSSSHRYKGVPSRFSGSGSGTEFTLTISSLQPEDFATYFCQQFKSYPLTFGQGTKLEIK

SEQ ID NO: 163 - protein, 107 aa, synthetic construct; identical to SEQ ID NO: 87

SEQ ID NO: 164 - protein, 119 aa, synthetic construct; identical to SEQ ID NO: 91

SEQ ID NO: 165 - protein, 246 aa, synthetic construct
QVQLVQSGAEVKKPGSSVKVSCKASGTDFHLWYIHWVRQAPGQGLEWMGRVFAGSGSYRYNEKFKGRVTITADTSTSTAYMELSSLRSEDTAVYYCAGSYYSYDVLDYWGQGTTVTVSSGGGGSGGGGSGGGGSGGGGSDIQMTQSPSFLSASVGDRVTITCKASQNVDDRVAWYQQKPGKAPKALIYSSSHRYKGVPSRFSGSGSGTEFTLTISSLQPEDFATYFCQQFKSYPLTFGQGTKLEIK

SEQ ID NO: 166 - protein, 107 aa, synthetic construct; identical to SEQ ID NO: 87

SEQ ID NO: 167 - protein, 119 aa, synthetic construct
QVQLVQSGAEVKKPGSSVKVSCKASGTDFHLWYIHWVRQAPGQGLEWMGRVFAGSGSYRYNEKFKGRVTITADTSTSTAYMELSSLRSEDTAVYYCAGSYYSYDVLDYWGQGTTVTVSS

SEQ ID NO: 168 - protein, 246 aa, synthetic construct
QVQLVQSGAEVKKPGSSVKVSCKASGTDFDKIYIHWVRQAPGQGLEWMGRISAGSGNTKYNEKFKGRVTITADTSTSTAYMELSSLRSEDTAVYYCAGSYYSYDVLDYWGQGTTVTVSSGGGGSGGGGSGGGGSGGGGSDIQMTQSPSFLSASVGDRVTITCKASQNVADRVAWYQQKPGKAPKALIYSSSHRYKGVPSRFSGSGSGTEFTLTISSLQPEDFATYFCQQFKSYPLTFGQGTKLEIK

SEQ ID NO: 169 - protein, 107 aa, synthetic construct; identical to SEQ ID NO: 141

SEQ ID NO: 170 - protein, 119 aa, synthetic construct; identical to SEQ ID NO: 115

SEQ ID NO: 171 - protein, 246 aa, synthetic construct
QVQLVQSGAEVKKPGSSVKVSCKASGTDFKLTYIHWVRQAPGQGLEWMGRISAGSGNTKYNEKFKGRVTITADTSTSTAYMELSSLRSEDTAVYYCAGSYYSYDVLDYWGQGTTVTVSSGGGGSGGGGSGGGGSGGGGSDIQMTQSPSFLSASVGDRVTITCKASQNVEDRVAWYQQKPGKAPKALIYSSSHRYKGVPSRFSGSGSGTEFTLTISSLQPEDFATYFCQQFKSYPLTFGQGTKLEIK

SEQ ID NO: 172 - protein, 107 aa, synthetic construct; identical to SEQ ID NO: 81

SEQ ID NO: 173 - protein, 119 aa, synthetic construct
QVQLVQSGAEVKKPGSSVKVSCKASGTDFKLTYIHWVRQAPGQGLEWMGRISAGSGNTKYNEKFKGRVTITADTSTSTAYMELSSLRSEDTAVYYCAGSYYSYDVLDYWGQGTTVTVSS

SEQ ID NO: 174 - protein, 246 aa, synthetic construct
QVQLVQSGAEVKKPGSSVKVSCKASGTDFRLTYIHWVRQAPGQGLEWMGRISPGSGNTKYNEKFKGRVTITADTSTSTAYMELSSLRSEDTAVYYCAGSYYSYDVLDYWGQGTTVTVSSGGGGSGGGGSGGGGSGGGGSDIQMTQSPSFLSASVGDRVTITCKASQNVGNRVAWYQQKPGKAPKALIYSSSHRYKGVPSRFSGSGSGTEFTLTISSLQPEDFATYFCQQFKSYPLTFGQGTKLEIK

SEQ ID NO: 175 - skipped

SEQ ID NO: 176 - protein, 119 aa, synthetic construct
QVQLVQSGAEVKKPGSSVKVSCKASGTDFRLTYIHWVRQAPGQGLEWMGRISPGSGNTKYNEKFKGRVTITADTSTSTAYMELSSLRSEDTAVYYCAGSYYSYDVLDYWGQGTTVTVSS

SEQ ID NO: 177 - protein, 246 aa, synthetic construct
QVQLVQSGAEVKKPGSSVKVSCKASGHDFDKTYIHWVRQAPGQGLEWMGRVSAGSGNVKYNEKFKGRVTITADTSTSTAYMELSSLRSEDTAVYYCAGSYYSYDVLDYWGQGTTVTVSSGGGGSGGGGSGGGGSGGGGSDIQMTQSPSFLSASVGDRVTITCKASQNVEDRVAWYQQKPGKAPKALIYSSSHRYKGVPSRFSGSGSGTEFTLTISSLQPEDFATYFCQQFKSYPLTFGQGTKLEIK

SEQ ID NO: 178 - protein, 107 aa, synthetic construct; identical to SEQ ID NO: 81

SEQ ID NO: 179 - protein, 119 aa, synthetic construct
QVQLVQSGAEVKKPGSSVKVSCKASGHDFDKTYIHWVRQAPGQGLEWMGRVSAGSGNVKYNEKFKGRVTITADTSTSTAYMELSSLRSEDTAVYYCAGSYYSYDVLDYWGQGTTVTVSS

SEQ ID NO: 180 - protein, 246 aa, synthetic construct
QVQLVQSGAEVKKPGSSVKVSCKASGHDFKLTYIHWVRQAPGQGLEWMGRVSPGSGNTKYNEKFKGRVTITADTSTSTAYMELSSLRSEDTAVYYCAGSYYSYDVLDYWGQGTTVTVSSGGGGSGGGGSGGGGSGGGGSDIQMTQSPSFLSASVGDRVTITCKASQNVEDRVAWHQQKPGKAPKALIYSSSHRYKGVPSRFSGSGSGTEFTLTISSLQPEDFATYFCQQFKSYPLTFGQGTKLEIK

SEQ ID NO: 181 - protein, 107 aa, synthetic construct
DIQMTQSPSFLSASVGDRVTITCKASQNVEDRVAWHQQKPGKAPKALIYSSSHRYKGVPSRFSGSGSGTEFTLTISSLQPEDFATYFCQQFKSYPLTFGQGTKLEIK

SEQ ID NO: 182 - protein, 119 aa, synthetic construct
QVQLVQSGAEVKKPGSSVKVSCKASGHDFKLTYIHWVRQAPGQGLEWMGRVSPGSGNTKYNEKFKGRVTITADTSTSTAYMELSSLRSEDTAVYYCAGSYYSYDVLDYWGQGTTVTVSS

SEQ ID NO: 183 - protein, 246 aa, synthetic construct
QVQLVQSGAEVKKPGSSVKVSCKASGHDFDKTYIHWVRQAPGQGLEWMGRIYPGSGNVKYNEKFKGRVTITADTSTSTAYMELSSLRSEDTAVYYCAGSYYSYDVLDYWGQGTTVTVSSGGGGSGGGGSGGGGSGGGGSDIQMTQSPSFLSASVGDRVTITCKASQNVADRVAWYQQKPGKAPKALIYSSSHRYKGVPSRFSGSGSGTEFTLTISSLQPEDFATYFCQQFKSYPLTFGQGTKLEIK

SEQ ID NO: 184 - protein, 107 aa, synthetic construct; identical to SEQ ID NO: 141

SEQ ID NO: 185 - protein, 119 aa, synthetic construct
QVQLVQSGAEVKKPGSSVKVSCKASGHDFDKTYIHWVRQAPGQGLEWMGRIYPGSGNVKYNEKFKGRVTITADTSTSTAYMELSSLRSEDTAVYYCAGSYYSYDVLDYWGQGTTVTVSS

SEQ ID NO: 186 - protein, 246 aa, synthetic construct
QVQLVQSGAEVKKPGSSVKVSCKASGTDFDKTYIHWVRQAPGQGLEWMGRISAGSGNVKYNEKFKGRVTITADTSTSTAYMELSSLRSEDTAVYYCAGSYYSYDVLDYWGQGTTVTVSSGGGGSGGGGSGGGGSGGGGSDIQMTQSPSFLSASVGDRVTITCKASQNVDDRVAWYQQKPGKAPKALIYSSSHRYKGVPSRFSGSGSGTEFTLTISSLQPEDFATYFCQQFKSYPLTFGQGTKLEIK

SEQ ID NO: 187 - protein, 119 aa, synthetic construct
QVQLVQSGAEVKKPGSSVKVSCKASGTDFDKTYIHWVRQAPGQGLEWMGRISAGSGNVKYNEKFKGRVTITADTSTSTAYMELSSLRSEDTAVYYCAGSYYSYDVLDYWGQGTTVTVSS

SEQ ID NO: 188 - protein, 119 aa, synthetic construct; identical to SEQ ID NO: 187

SEQ ID NO: 189 - protein, 246 aa, synthetic construct
QVQLVQSGAEVKKPGSSVKVSCKASGTDFDKIYIHWVRQAPGQGLEWMGRISAGSGNIKYNEKFKGRVTITADTSTSTAYMELSSLRSEDTAVYYCAGSYYSYDVLDYWGQGTTVTVSSGGGGSGGGGSGGGGSGGGGSDIQMTQSPSFLSASVGDRVTITCKASQNVDDRVAWYQQKPGKAPKALIYSSSHRYKGVPSRFSGSGSGTEFTLTISSLQPEDFATYFCQQFKSYPLTFGQGTKLEIK

SEQ ID NO: 190 - protein, 107 aa, synthetic construct; identical to SEQ ID NO: 87

SEQ ID NO: 191 - protein, 119 aa, synthetic construct
QVQLVQSGAEVKKPGSSVKVSCKASGTDFDKIYIHWVRQAPGQGLEWMGRISAGSGNIKYNEKFKGRVTITADTSTSTAYMELSSLRSEDTAVYYCAGSYYSYDVLDYWGQGTTVTVSS

SEQ ID NO: 192 - protein, 246 aa, synthetic construct
QVQLVQSGAEVKKPGSSVKVSCKASGTDFDKIYIHWVRQAPGQGLEWMGRISAGSGNVKYNEKFKGRVTITADTSTSTAYMELSSLRSEDTAVYYCAGSYYSYDVLDYWGQGTTVTVSSGGGGSGGGGSGGGGSGGGGSDIQMTQSPSFLSASVGDRVTITCKASQNVGDRVAWYQQKPGKAPKALIYSSSHRYKGVPSRFSGSGSGTEFTLTISSLQPEDFATYFCQQFKSYPLTFGQGTKLEIK

SEQ ID NO: 193 - protein, 107 aa, synthetic construct; identical to SEQ ID NO: 102

SEQ ID NO: 194 - protein, 119 aa, synthetic construct; identical to SEQ ID NO: 85

SEQ ID NO: 195 - protein, 246 aa, synthetic construct
QVQLVQSGAEVKKPGSSVKVSCKASGGTFKLTYIHWVRQAPGQGLEWMGRVSAGSGNVKYNEKFKGRVTITADTSTSTAYMELSSLRSEDTAVYYCAGSYYSYDVLDYWGQGTTVTVSSGGGGSGGGGSGGGGSGGGGSDIQMTQSPSFLSASVGDRVTITCKASQNVDDRVAWYQQKPGKAPKALIYSSSHRYKGVPSRFSGSGSGTEFTLTISSLQPEDFATYFCQQFKSYPLTFGQGTKLEIK

SEQ ID NO: 196 - protein, 107 aa, synthetic construct; identical to SEQ ID NO: 87

SEQ ID NO: 197 - protein, 119 aa, synthetic construct
QVQLVQSGAEVKKPGSSVKVSCKASGGTFKLTYIHWVRQAPGQGLEWMGRVSAGSGNVKYNEKFKGRVTITADTSTSTAYMELSSLRSEDTAVYYCAGSYYSYDVLDYWGQGTTVTVSS

SEQ ID NO: 198 - protein, 246 aa, synthetic construct
QVQLVQSGAEVKKPGSSVKVSCKASGTDFKLTYIHWVRQAPGQGLEWMGRISPGSGNVKYNEKFKGRVTITADTSTSTAYMELSSLRSEDTAVYYCAGSYYSYDVLDYWGQGTTVTVSSGGGGSGGGGSGGGGSGGGGSDIQMTQSPSFLSASVGDRVTITCKASQNVDNRVAWHQQKPGKAPKALIYSSSHRYKGVPSRFSGSGSGTEFTLTISSLQPEDFATYFCQQFKSYPLTFGQGTKLEIK

SEQ ID NO: 199 - protein, 107 aa, synthetic construct
DIQMTQSPSFLSASVGDRVTITCKASQNVDNRVAWHQQKPGKAPKALIYSSSHRYKGVPSRFSGSGSGTEFTLTISSLQPEDFATYFCQQFKSYPLTFGQGTKLEIK

SEQ ID NO: 200 - protein, 119 aa, synthetic construct
QVQLVQSGAEVKKPGSSVKVSCKASGTDFKLTYIHWVRQAPGQGLEWMGRISPGSGNVKYNEKFKGRVTITADTSTSTAYMELSSLRSEDTAVYYCAGSYYSYDVLDYWGQGTTVTVSS

SEQ ID NO: 201 - protein, 246 aa, synthetic construct
QVQLVQSGAEVKKPGSSVKVSCKASGHDFDKFYIHWVRQAPGQGLEWMGRVSAGSGNTKYNEKFKGRVTITADTSTSTAYMELSSLRSEDTAVYYCAGSYYSYDVLDYWGQGTTVTVSSGGGGSGGGGSGGGGSGGGGSDIQMTQSPSFLSASVGDRVTITCKASQNVDNRVAWYQQKPGKAPKALIYSSSHRYKGVPSRFSGSGSGTEFTLTISSLQPEDFATYFCQQFKSYPLTFGQGTKLEIK

SEQ ID NO: 202 - protein, 107 aa, synthetic construct; identical to SEQ ID NO: 90

SEQ ID NO: 203 - protein, 119 aa, synthetic construct
QVQLVQSGAEVKKPGSSVKVSCKASGHDFDKFYIHWVRQAPGQGLEWMGRVSAGSGNTKYNEKFKGRVTITADTSTSTAYMELSSLRSEDTAVYYCAGSYYSYDVLDYWGQGTTVTVSS

SEQ ID NO: 204 - protein, 246 aa, synthetic construct
QVQLVQSGAEVKKPGSSVKVSCKASGTDFDKFYIHWVRQAPGQGLEWMGRVSAGSGNVKYNEKFKGRVTITADTSTSTAYMELSSLRSEDTAVYYCAGSYYSYDVLDYWGQGTTVTVSSGGGGSGGGGSGGGGSGGGGSDIQMTQSPSFLSASVGDRVTITCKASQNVGDRVVWYQQKPGKAPKALIYSSSHRYKGVPSRFSGSGSGTEFTLTISSLQPEDFATYFCQQFKSYPLTFGQGTKLEIK

SEQ ID NO: 205 - protein, 119 aa, synthetic construct
QVQLVQSGAEVKKPGSSVKVSCKASGTDFDKFYIHWVRQAPGQGLEWMGRVSAGSGNVKYNEKFKGRVTITADTSTSTAYMELSSLRSEDTAVYYCAGSYYSYDVLDYWGQGTTVTVSS

SEQ ID NO: 206 - protein, 246 aa, synthetic construct
QVQLVQSGAEVKKPGSSVKVSCKASGYSFTTYYIHWVRQAPGQGLEWMGWFSAGSGNTKYNEKFKGRVTITADTSTSTAYMELSSLRSEDTAVYYCAVSYYSYDVLDYWGQGTTVTVSSGGGGSGGGGSGGGGSGGGGSDIQMTQSPSFLSASVGDRVTITCKASQNVGINVVWHQQKPGKAPKALIYSSSHRYSGVPSRFSGSGSGTEFTLTISSLQPEDFATYFCQQFKSYPLTFGQGTKLEIK

SEQ ID NO: 207 - protein, 119 aa, synthetic construct
QVQLVQSGAEVKKPGSSVKVSCKASGYSFTTYYIHWVRQAPGQGLEWMGWFSAGSGNTKYNEKFKGRVTITADTSTSTAYMELSSLRSEDTAVYYCAVSYYSYDVLDYWGQGTTVTVSS

SEQ ID NO: 208 - protein, 246 aa, synthetic construct
QVQLVQSGAEVKKPGSSVKVSCKASGYSFTTYYIHWVRQAPGQGLEWMGWFSAGSGNTKYNEKFKGRVTITADTSTSTAYMELSSLRSEDTAVYYCAGSYYSYDVLDYWGQGTTVTVSSGGGGSGGGGSGGGGSGGGGSDIQMTQSPSFLSASVGDRVTITCKASQNVGINVVWHQQKPGKAPKALIYSSSHRYSGVPSRFSGSGSGTEFTLTISSLQPEDFATYFCQQFKSYPLTFGQGTKLEIK

SEQ ID NO: 209 - protein, 119 aa, synthetic construct
QVQLVQSGAEVKKPGSSVKVSCKASGYSFTTYYIHWVRQAPGQGLEWMGWFSAGSGNTKYNEKFKGRVTITADTSTSTAYMELSSLRSEDTAVYYCAGSYYSYDVLDYWGQGTTVTVSS

SEQ ID NO: 210 - protein, 246 aa, synthetic construct
QVQLVQSGAEVKKPGSSVKVSCKASGYSFTTYYIHWVRQAPGQGLEWMGWFFPGSGNTKYNEKFKGRVTITADTSTSTAYMELSSLRSEDTAVYYCAGSYYSYDVLDYWGQGTTVTVSSGGGGSGGGGSGGGGSGGGGSDIQMTQSPSFLSASVGDRVTITCKASQNVGINVVWHQQKPGKAPKALIYSSSHRYSGVPSRFSGSGSGTEFTLTISSLQPEDFATYFCQQFKSYPLTFGQGTKLEIK

SEQ ID NO: 211 - protein, 119 aa, synthetic construct
QVQLVQSGAEVKKPGSSVKVSCKASGYSFTTYYIHWVRQAPGQGLEWMGWFFPGSGNTKYNEKFKGRVTITADTSTSTAYMELSSLRSEDTAVYYCAGSYYSYDVLDYWGQGTTVTVSS

SEQ ID NO: 212 - protein, 246 aa, synthetic construct
QVQLVQSGAEVKKPGSSVKVSCKASGYSFTTYYIHWVRQAPGQGLEWMGWFSPGSGNTKYNEKFKGRVTITADTSTSTAYMELSSLRSEDTAVYYCAVSYYSYDVLDYWGQGTTVTVSSGGGGSGGGGSGGGGSGGGGSDIQMTQSPSFLSASVGDRVTITCKASQNVGINVVWHQQKPGKAPKALIYSSSHRYSGVPSRFSGSGSGTEFTLTISSLQPEDFATYFCQQFKSYPLTFGQGTKLEIK

SEQ ID NO: 213 - protein, 119 aa, synthetic construct
QVQLVQSGAEVKKPGSSVKVSCKASGYSFTTYYIHWVRQAPGQGLEWMGWFSPGSGNTKYNEKFKGRVTITADTSTSTAYMELSSLRSEDTAVYYCAVSYYSYDVLDYWGQGTTVTVSS

SEQ ID NO: 214 - protein, 246 aa, synthetic construct
QVQLVQSGAEVKKPGSSVKVSCKASGYSFTTYYIHWVRQAPGQGLEWMGWFSPGSGNTKYNEKFKGRVTITADTSTSTAYMELSSLRSEDTAVYYCAGSYYSYDVLDYWGQGTTVTVSSGGGGSGGGGSGGGGSGGGGSDIQMTQSPSFLSASVGDRVTITCKASQNVGINVVWHQQKPGKAPKALIYSSSHRYSGVPSRFSGSGSGTEFTLTISSLQPEDFATYFCQQFKSYPLTFGQGTKLEIK

SEQ ID NO: 215 - protein, 119 aa, synthetic construct
QVQLVQSGAEVKKPGSSVKVSCKASGYSFTTYYIHWVRQAPGQGLEWMGWFSPGSGNTKYNEKFKGRVTITADTSTSTAYMELSSLRSEDTAVYYCAGSYYSYDVLDYWGQGTTVTVSS

SEQ ID NO: 216 - protein, 246 aa, synthetic construct
QVQLVQSGAEVKKPGSSVKVSCKASGYSFTTYYIHWVRQAPGQGLEWMGRIFPGSGNIKYNEKFKGRVTITADTSTSTAYMELSSLRSEDTAVYYCAGSYYSYDVLDYWGQGTTVTVSSGGGGSGGGGSGGGGSGGGGSDIQMTQSPSFLSASVGDRVTITCKASQNVGINVVWHQQKPGKAPKALIYSSSHRYSGVPSRFSGSGSGTEFTLTISSLQPEDFATYFCQQFKSYPLTFGQGTKLEIK

SEQ ID NO: 217 - protein, 119 aa, synthetic construct
QVQLVQSGAEVKKPGSSVKVSCKASGYSFTTYYIHWVRQAPGQGLEWMGRIFPGSGNIKYNEKFKGRVTITADTSTSTAYMELSSLRSEDTAVYYCAGSYYSYDVLDYWGQGTTVTVSS

SEQ ID NO: 218 - protein, 246 aa, synthetic construct
QVQLVQSGAEVKKPGSSVKVSCKASGYSFTTYYIHWVRQAPGQGLEWMGWFFPGSGNIKYNEKFKGRVTITADTSTSTAYMELSSLRSEDTAVYYCAGSIYSAGVLDYWGQGTTVTVSSGGGGSGGGGSGGGGSGGGGSDIQMTQSPSFLSASVGDRVTITCKASQNVGINVVWHQQKPGKAPKALIYSSSHRYSGVPSRFSGSGSGTEFTLTISSLQPEDFATYFCQQFKSYPLTFGQGTKLEIK

SEQ ID NO: 219 - protein, 119 aa, synthetic construct
QVQLVQSGAEVKKPGSSVKVSCKASGYSFTTYYIHWVRQAPGQGLEWMGWFFPGSGNIKYNEKFKGRVTITADTSTSTAYMELSSLRSEDTAVYYCAGSIYSAGVLDYWGQGTTVTVSS

SEQ ID NO: 220 - protein, 246 aa, synthetic construct
QVQLVQSGAEVKKPGSSVKVSCKASGYSFTLGYIHWVRQAPGQGLEWMGWFFPGSGNIKYNEKFKGRVTITADTSTSTAYMELSSLRSEDTAVYYCAGSYYSYDVLDYWGQGTTVTVSSGGGGSGGGGSGGGGSGGGGSDIQMTQSPSFLSASVGDRVTITCKASQNVGINVVWHQQKPGKAPKALIYSSSHRYSGVPSRFSGSGSGTEFTLTISSLQPEDFATYFCQQFKSYPLTFGQGTKLEIK

SEQ ID NO: 221 - protein, 119 aa, synthetic construct
QVQLVQSGAEVKKPGSSVKVSCKASGYSFTLGYIHWVRQAPGQGLEWMGWFFPGSGNIKYNEKFKGRVTITADTSTSTAYMELSSLRSEDTAVYYCAGSYYSYDVLDYWGQGTTVTVSS

SEQ ID NO: 222 - protein, 246 aa, synthetic construct
QVQLVQSGAEVKKPGSSVKVSCKASGYSFRLTYIHWVRQAPGQGLEWMGWFFPGSGNIKYNEKFKGRVTITADTSTSTAYMELSSLRSEDTAVYYCAGSYYSYDVLDYWGQGTTVTVSSGGGGSGGGGSGGGGSGGGGSDIQMTQSPSFLSASVGDRVTITCKASQNVGINVVWHQQKPGKAPKALIYSSSHRYSGVPSRFSGSGSGTEFTLTISSLQPEDFATYFCQQFKSYPLTFGQGTKLEIK

SEQ ID NO: 223 - protein, 119 aa, synthetic construct
QVQLVQSGAEVKKPGSSVKVSCKASGYSFRLTYIHWVRQAPGQGLEWMGWFFPGSGNIKYNEKFKGRVTITADTSTSTAYMELSSLRSEDTAVYYCAGSYYSYDVLDYWGQGTTVTVSS

SEQ ID NO: 224 - protein, 246 aa, synthetic construct
QVQLVQSGAEVKKPGSSVKVSCKASGYSFHNWYIHWVRQAPGQGLEWMGWFFPGSGNIKYNEKFKGRVTITADTSTSTAYMELSSLRSEDTAVYYCAGSYYSYDVLDYWGQGTTVTVSSGGGGSGGGGSGGGGSGGGGSDIQMTQSPSFLSASVGDRVTITCKASQNVGINVVWHQQKPGKAPKALIYSSSHRYSGVPSRFSGSGSGTEFTLTISSLQPEDFATYFCQQFKSYPLTFGQGTKLEIK

SEQ ID NO: 225 - protein, 119 aa, synthetic construct
QVQLVQSGAEVKKPGSSVKVSCKASGYSFHNWYIHWVRQAPGQGLEWMGWFFPGSGNIKYNEKFKGRVTITADTSTSTAYMELSSLRSEDTAVYYCAGSYYSYDVLDYWGQGTTVTVSS

SEQ ID NO: 226-229 - skipped (4 entries)

SEQ ID NO: 230 - protein, 107 aa, synthetic construct
  VARIANT 30: note = G, E, A or D
  VARIANT 32: note = R or K
  VARIANT 36: note = Y or H
  VARIANT 56: note = K or S
DIQMTQSPSFLSASVGDRVTITCKASQNVXBXVAWXQQKPGKAPKALIYSSSHRYXGVPSRFSGSGSGTEFTLTISSLQPEDFATYFCQQFKSYPLTFGQGTKLEIK

SEQ ID NO: 231 - protein, 119 aa, synthetic construct
  VARIANT 27: note = H, T, G or Y
  VARIANT 28: note = D, T or S
  VARIANT 30: note = H, R, D, K or T
  VARIANT 31: note = L, D, K, T or N
  VARIANT 32: note = W, F, T, I, Y or G
  VARIANT 50: note = R or W
  VARIANT 51: note = V, I or F
  VARIANT 52: note = F, S or Y
  VARIANT 53: note = A or P
  VARIANT 57: note = N or S
  VARIANT 58: note = T, V, Y or I
  VARIANT 59: note = K or R
  VARIANT 98: note = G or V
  VARIANT 100: note = Y or I
  VARIANT 103: note = Y or A
  VARIANT 104: note = D or G
QVQLVQSGAEVKKPGSSVKVSCKASGXXFXXXYIHWVRQAPGQGLEWMGXXXXGSGXXXYNEKFKGRVTITADTSTSTAYMELSSLRSEDTAVYYCAXSXYSXXVLDYWGQGTTVTVSS

SEQ ID NO: 232 - protein, 107 aa, synthetic construct
DIQMTQTTSSLSASLGDRVTISCSASQGISNYLNWYQQKPDGTVKLLIYYTSSLHSGVPSRFSGSGSGTDYSLTISNLEPEDIATYYCQQYSKLPRTFGGGTKVEIK

SEQ ID NO: 233 - protein, 120 aa, synthetic construct
QVQLKESGPGLVAPSQSLSITCTVSGFSLTAYGVNWVRQPPGKGLEWLGMIWGDGNTDYNSALKSRLSISKDNSKSQVFLKMNSLQTDDTARYYCARDRVTATLYAMDYWGQGTSVTVSS

SEQ ID NO: 234-1099 - skipped (866 entries)

SEQ ID NO: 1100 - protein, 119 aa, synthetic construct; identical to SEQ ID NO: 9

SEQ ID NO: 1101 - protein, 106 aa, synthetic construct
QSVLTQPPSVSEAPRQRVTISCKASQNVGINVVWHQQLPGKAPKALIYSSSHRYSGVSDRFSGSGSGTSFSLAISGLQSEDEADYFCQQFKSYPLTFGTGTKVTVL

SEQ ID NO: 1102 - protein, 5 aa, synthetic construct
SAYMH

SEQ ID NO: 1103 - protein, 17 aa, synthetic construct
RIDPATGKTKYAPKFQA

SEQ ID NO: 1104 - protein, 10 aa, synthetic construct
SLNWDYGLDY

SEQ ID NO: 1105 - protein, 7 aa, synthetic construct
GFNIKSA

SEQ ID NO: 1106 - protein, 6 aa, synthetic construct
DPATGK

SEQ ID NO: 1107 - protein, 15 aa, synthetic construct
RASKSVSILGTHLIH

SEQ ID NO: 1108 - protein, 7 aa, synthetic construct
AASNLES

SEQ ID NO: 1109 - protein, 9 aa, synthetic construct
QQSIEDPWT

SEQ ID NO: 1110 - protein, 11 aa, synthetic construct
SKSVSILGTHL

SEQ ID NO: 1111 - protein, 111 aa, synthetic construct
DIVLTQSPASLAVSLGQRATISCRASKSVSILGTHLIHWYQQKPGQPPKLLIYAASNLESGVPARFSGSGSETVFTLNIHPVEEEDAATYFCQQSIEDPWTFGGGTKLGIK

SEQ ID NO: 1112 - protein, 119 aa, synthetic construct
EVQLQQSVADLVRPGASLKLSCTASGFNIKSAYMHWVIQRPDQGPECLGRIDPATGKTKYAPKFQAKATITADTSSNTAYLQLSSLTSEDTAIYYCTRSLNWDYGLDYWGQGTSVTVSS

SEQ ID NO: 1113 - protein, 119 aa, synthetic construct
QVQLVQSGAEVKKPGASVKVSCKASGFNIKSAYMHWVRQAPGQGLEWMGRIDPATGKTKYAPKFQARVTMTADTSTNTAYMELSSLRSEDTAVYYCARSLNWDYGLDYWGQGTLVTVSS

SEQ ID NO: 1114 - protein, 119 aa, synthetic construct
QVQLVQSGAEVKKPGASVKVSCKASGFNIKSAYMHWVRQAPGQEPGCMGRIDPATGKTKYAPKFQARVTMTADTSINTAYTELSSLRSEDTATYYCARSLNWDYGLDYWGQGTLVTVSS

SEQ ID NO: 1115 - protein, 119 aa, synthetic construct
QVQLVQSGAEVKKPGSSVKVSCKASGFNIKSAYMHWVRQAPGQGLEWMGRIDPATGKTKYAPKFQARVTITADTSTNTAYMELSSLRSEDTAVYYCARSLNWDYGLDYWGQGTLVTVSS

SEQ ID NO: 1116 - protein, 119 aa, synthetic construct
QVQLVQSGAEVKKPGASVKVSCKASGFNIKSAYMHWVRQAPGQRLEWMGRIDPATGKTKYAPKFQARVTITADTSANTAYMELSSLRSEDTAVYYCARSLNWDYGLDYWGQGTLVTVSS

SEQ ID NO: 1117 - protein, 109 aa, synthetic construct
EIVLTQSPATLSLSPGERATLSCRASKSVSILGTHLIHWYQQKPGQAPRLLIYAASNLESGIPARFSGSGSETDFTLTISSLEPEDFAVYFCQQSIEDPFGGGTKVEIK

SEQ ID NO: 1118 - protein, 109 aa, synthetic construct
EIVLTQSPATLSLSPGERATLSCRASKSVSILGTHLIHWYQQKPGLAPRLLIYAASNLESGIPDRFSGSGSETDFTLTISRLEPEDFAVYFCQQSIEDPFGGGTKVEIK

SEQ ID NO: 1119 - protein, 109 aa, synthetic construct
EIVLTQSPGTLSLSPGERATLSCRASKSVSILGTHLIHWYQQKPGQAPRLLIYAASNLESGIPDRFSGSGSETDFTLTISRLEPEDFAVYFCQQSIEDPFGGGTKVEIK

SEQ ID NO: 1120 - protein, 5 aa, synthetic construct
DTYMY

SEQ ID NO: 1121 - protein, 17 aa, synthetic construct
RIDPANGNTKYDPKFQD

SEQ ID NO: 1122 - protein, 9 aa, synthetic construct
GSYYYAMDY

SEQ ID NO: 1123 - protein, 7 aa, synthetic construct
GFKTEDT

SEQ ID NO: 1124 - protein, 6 aa, synthetic construct
DPANGN

SEQ ID NO: 1125 - protein, 10 aa, synthetic construct
GFKTEDTYMY

SEQ ID NO: 1126 - protein, 15 aa, synthetic construct
RASESVDSYGNSFMH

SEQ ID NO: 1127 - protein, 7 aa, synthetic construct
RASNLES

SEQ ID NO: 1128 - protein, 9 aa, synthetic construct
QQSNEDPYT

SEQ ID NO: 1129 - protein, 111 aa, synthetic construct
DIVLTQSPASLAVSLGQRATISCRASESVDSYGNSFMHWYQQKPGQPPKLLIYRASNLESGIPARFSGSGSRTDFTLTINPVEADDVATYYCQQSNEDPYTFGGGTKLEIK

SEQ ID NO: 1130 - protein, 118 aa, synthetic construct
EVQLQQSGAELVKPGASVKLSCTASGFKTEDTYMYWVKQRPEQGLEWIGRIDPANGNTKYDPKFQDKATITADSSSNTAYLQLSSLPSEDTAVYYCARGSYYYAMDYWGQGTSVTVSS

SEQ ID NO: 1131 - protein, 118 aa, synthetic construct
QVQLVQSGAEVKKPGSSVKVSCKASGFKTEDTYMYWVRQAPGQGLEWIGRIDPANGNTKYDPKFQDRATITADSSTNTAYMELSSLRSEDTAVYYCARGSYYYAMDYWGQGTLVTVSS

SEQ ID NO: 1132 - protein, 118 aa, synthetic construct
QVQLVQSGAEVKKPGASVKVSCKASGFKTEDTYMYWVRQAPGQRLEWIGRIDPANGNTKYDPKFQDRATITADSSANTAYMELSSLRSEDTAVYYCARGSYYYAMDYWGQGTLVTVSS

SEQ ID NO: 1133 - protein, 118 aa, synthetic construct
EVQLVESGGGLVQPGGSLKLSCAASGFKTEDTYMYWVRQASGKGLEWIGRIDPANGNTKYDPKFQDRATISADSSKNTAYLQMNSLKTEDTAVYYCARGSYYYAMDYWGQGTLVTVSS

SEQ ID NO: 1134 - protein, 118 aa, synthetic construct
EVQLVQSGAEVKKPGESLRISCKASGFKTEDTYMYWVRQMPGKGLEWIGRIDPANGNTKYDPKFQDQATISADSSINTAYLQWSSLKASDTAMYYCARGSYYYAMDYWGQGTLVTVSS

SEQ ID NO: 1135 - protein, 118 aa, synthetic construct
QVQLVQSGSELKKPGASVKVSCKASGFKTEDTYMYWVRQAPGQGLEWIGRIDPANGNTKYDPKFQDRAVISADSSVNTAYLQISSLKAEDTAVYYCARGSYYYAMDYWGQGTLVTVSS

SEQ ID NO: 1136 - protein, 111 aa, synthetic construct
DIVLTQSPDSLAVSLGERATINCRASESVDSYGNSFMHWYQQKPGQPPKLLIYRASNLESGVPDRFSGSGSRTDFTLTISSLQAEDVAVYYCQQSNEDPYTFGQGTKLEIK

SEQ ID NO: 1137 - protein, 111 aa, synthetic construct
EIVLTQSPATLSLSPGERATLSCRASESVDSYGNSFMHWYQQKPGQAPKLLIYRASNLESGIPARFSGSGSRTDFTLTISRLEPEDFAVYYCQQSNEDPYTFGQGTKLEIK

SEQ ID NO: 1138 - protein, 111 aa, synthetic construct
DIQLTQSPSSLSASVGDRVTITCRASESVDSYGNSFMHWYQQKPGQAPKLLIYRASNLESGVPSRFSGSGSRTDFTLTISSLQPEDVATYYCQQSNEDPYTFGQGTKLEIK

SEQ ID NO: 1139 - protein, 111 aa, synthetic construct
AIQLTQSPSSLSASVGDRVTITCRASESVDSYGNSFMHWYQQKPGKAPKLLIYRASNLESGVPSRFSGSGSRTDFTLTISSLQPEDFATYYCQQSNEDPYTFGQGTKLEIK

SEQ ID NO: 1140 - protein, 111 aa, synthetic construct
EIVLTQSPDFQSVTPKEKVTITCRASESVDSYGNSFMHWYQQKPDQSPKLLIYRASNLESGVPSRFSGSGSRTDFTLTINSLEAEDAATYYCQQSNEDPYTFGQGTKLEIK

SEQ ID NO: 1141 - protein, 5 aa, synthetic construct
SYAMS

SEQ ID NO: 1142 - protein, 17 aa, synthetic construct
HISNGGDYIYYADTVKG

SEQ ID NO: 1143 - protein, 12 aa, synthetic construct
PSYYSDPWFFDV

SEQ ID NO: 1144 - protein, 7 aa, synthetic construct
GFTFRSY

SEQ ID NO: 1145 - protein, 6 aa, synthetic construct
SNGGDY

SEQ ID NO: 1146 - protein, 10 aa, synthetic construct
GFTFRSYAMS

SEQ ID NO: 1147 - protein, 10 aa, synthetic construct
SAGSSVSFMH

SEQ ID NO: 1148 - protein, 7 aa, synthetic construct
DTSKLAS

SEQ ID NO: 1149 - protein, 9 aa, synthetic construct
LQGSGFPLT

SEQ ID NO: 1150 - protein, 6 aa, synthetic construct
GSSVSF

SEQ ID NO: 1151 - protein, 106 aa, synthetic construct
ENVLTQSPAIMSASPGEKVTMTCSAGSSVSFMHWYQQKSSTSPKLWIYDTSKLASGVPGRFSGSGSGNSFSLTISSMEAEDVAIYYCLQGSGFPLTFGSGTKLEIK

SEQ ID NO: 1152 - protein, 121 aa, synthetic construct
DVKLVESGEGLVKPGGSLKLSCAASGFTFRSYAMSWVRQTPEKRLEWVAHISNGGDYIYYADTVKGRFTISRDNARNTLYLQMSSLKSEDTAMYYCTRPSYYSDPWFFDVWGTGTTVTVSS

SEQ ID NO: 1153 - protein, 121 aa, synthetic construct
EVQLVESGGGLVQPGGSLRLSCAASGFTFRSYAMSWVRQAPGKGLEWVAHISNGGDYIYYADTVKGRFTISRDNAKNSLYLQMNSLRAEDTAVYYCTRPSYYSDPWFFDVWGQGTTVTVSS

SEQ ID NO: 1154 - protein, 121 aa, synthetic construct
QVQLVESGGGVVQPGRSLRLSCAASGFTFRSYAMSWVRQAPGKGLEWVAHISNGGDYIYYADTVKGRFTISRDNSKNTLYLQMSSLRAEDTAVYYCTRPSYYSDPWFFDVWGQGTTVTVSS

SEQ ID NO: 1155 - protein, 121 aa, synthetic construct
EVQLVESGGGLVQPGGSLRLSCAASGFTFRSYAMSWVRQAPGKGLEWVAHISNGGDYIYYADTVKGRFTISRDNSKNTLYLQMNSLRAEDTAVYYCTRPSYYSDPWFFDVWGQGTTVTVSS

SEQ ID NO: 1156 - protein, 121 aa, synthetic construct
QVQLVQSGSELKKPGASVKVSCKASGFTFRSYAMSWVRQAPGQGLEWVAHISNGGDYIYYADTVKGRFVISRDNSVNTLYLQISSLKAEDTAVYYCTRPSYYSDPWFFDVWGQGTTVTVSS

SEQ ID NO: 1157 - protein, 121 aa, synthetic construct
QVQLVQSGAEVKKPGASVKVSCKASGFTFRSYAMSWVRQAPGQRLEWVAHISNGGDYIYYADTVKGRFTITRDNSANTLYMELSSLRSEDTAVYYCTRPSYYSDPWFFDVWGQGTTVTVSS

SEQ ID NO: 1158 - protein, 106 aa, synthetic construct
ENVLTQSPATLSLSPGERATLSCSAGSSVSFMHWYQQKPGQAPKLLIYDTSKLASGIPARFSGSGSGNDFTLTISSLEPEDFAVYYCLQGSGFPLTFGQGTKLEIK

SEQ ID NO: 1159 - protein, 106 aa, synthetic construct
ENVLTQSPDFQSVTPKEKVTITCSAGSSVSFMHWYQQKPDQSPKLLIYDTSKLASGVPSRFSGSGSGNDFTLTINSLEAEDAATYYCLQGSGFPLTFGQGTKLEIK

SEQ ID NO: 1160 - protein, 106 aa, synthetic construct
DNQLTQSPSSLSASVGDRVTITCSAGSSVSFMHWYQQKPGKVPKLLIYDTSKLASGVPSRFSGSGSGNDFTLTISSLQPEDVATYYCLQGSGFPLTFGQGTKLEIK

SEQ ID NO: 1161 - protein, 106 aa, synthetic construct
ANQLTQSPSSLSASVGDRVTITCSAGSSVSFMHWYQQKPGKAPKLLIYDTSKLASGVPSRFSGSGSGNDFTLTISSLQPEDFATYYCLQGSGFPLTFGQGTKLEIK

SEQ ID NO: 1162 - protein, 106 aa, synthetic construct
DNVLTQSPDSLAVSLGERATINCSAGSSVSFMHWYQQKPGQPPKLLIYDTSKLASGVPDRFSGSGSGNDFTLTISSLQAEDVAVYYCLQGSGFPLTFGQGTKLEIK

SEQ ID NO: 1163 - protein, 5 aa, synthetic construct
DYNIH

SEQ ID NO: 1164 - protein, 17 aa, synthetic construct
YINPYNGRTGYNQKFKA

SEQ ID NO: 1165 - protein, 9 aa, synthetic construct
WDGSSYFDY

SEQ ID NO: 1166 - protein, 10 aa, synthetic construct
GYTFTDYNIH

SEQ ID NO: 1167 - protein, 6 aa, synthetic construct
NPYNGR

SEQ ID NO: 1168 - protein, 10 aa, synthetic construct
SASSSVSYMH

SEQ ID NO: 1169 - protein, 7 aa, synthetic construct
EISKLAS

SEQ ID NO: 1170 - protein, 9 aa, synthetic construct
QQWNYPLLT

SEQ ID NO: 1171 - protein, 106 aa, synthetic construct
EIVLTQSPAITAASLGQKVTITCSASSSVSYMHWYQQKSGTSPKPWIYEISKLASGVPARFSGSGSGTSYSLTISSMEAEDAAIYYCQQWNYPLLTFGAGTKLELK

SEQ ID NO: 1172 - protein, 118 aa, synthetic construct
EVQLQQSGPVLVKPGASVRMSCKASGYTFTDYNIHWVKQSHGRSLEWVGYINPYNGRTGYNQKFKAKATLTVDKSSSTAYMDLRSLTSEDSAVYYCARWDGSSYFDYWGQGTTLTVSS

SEQ ID NO: 1173 - protein, 118 aa, synthetic construct
QVQLVQSGAEVKKPGSSVKVSCKASGYTFTDYNIHWVRQAPGQGLEWVGYINPYNGRTGYNQKFKARATLTVDKSTSTAYMELSSLRSEDTAVYYCARWDGSSYFDYWGQGTTVTVSS

SEQ ID NO: 1174 - protein, 118 aa, synthetic construct
QVQLVQSGAEVKKPGASVKVSCKASGYTFTDYNIHWVRQAPGQGLEWVGYINPYNGRTGYNQKFKARATLTVDKSTSTAYMELRSLRSDDMAVYYCARWDGSSYFDYWGQGTTVTVSS

SEQ ID NO: 1175 - protein, 118 aa, synthetic construct
QVQLVQSGAEVKKPGASVKVSCKASGYTFTDYNIHWVRQATGQGLEWVGYINPYNGRTGYNQKFKARATLTVNKSISTAYMELSSLRSEDTAVYYCARWDGSSYFDYWGQGTTVTVSS

SEQ ID NO: 1176 - protein, 118 aa, synthetic construct
EVQLVESGGGLVQPGRSLRLSCTASGYTFTDYNIHWVRQAPGKGLEWVGYINPYNGRTGYNQKFKARATLSVDKSKSIAYLQMNSLKTEDTAVYYCARWDGSSYFDYWGQGTTVTVSS

SEQ ID NO: 1177 - protein, 118 aa, synthetic construct
QVQLVQSGSELKKPGASVKVSCKASGYTFTDYNIHWVRQAPGQGLEWVGYINPYNGRTGYNQKFKARAVLSVDKSVSTAYLQISSLKAEDTAVYYCARWDGSSYFDYWGQGTTVTVSS

SEQ ID NO: 1178 - protein, 106 aa, synthetic construct
EIVLTQSPATLSLSPGERATLSCSASSSVSYMHWYQQKPGQAPKLLIYEISKLASGIPARFSGSGSGTDYTLTISSLEPEDFAVYYCQQWNYPLLTFGQGTKLEIK

SEQ ID NO: 1179 - protein, 106 aa, synthetic construct
EIVLTQSPATLSLSPGERATLSCSASSSVSYMHWYQQKPGQAPKLLIYEISKLASGIPARFSGSGSGTDYTLTISRLEPEDFAVYYCQQWNYPLLTFGQGTKLEIK

SEQ ID NO: 1180 - protein, 106 aa, synthetic construct
EIVLTQSPDFQSVTPKEKVTITCSASSSVSYMHWYQQKPDQSPKLLIYEISKLASGVPSRFSGSGSGTDYTLTINSLEAEDAATYYCQQWNYPLLTFGQGTKLEIK

SEQ ID NO: 1181 - protein, 106 aa, synthetic construct
DIQLTQSPSFLSASVGDRVTITCSASSSVSYMHWYQQKPGKAPKLLIYEISKLASGVPSRFSGSGSGTEYTLTISSLQPEDFATYYCQQWNYPLLTFGQGTKLEIK

SEQ ID NO: 1182 - protein, 106 aa, synthetic construct
AIQLTQSPSSLSASVGDRVTITCSASSSVSYMHWYQQKPGKAPKLLIYEISKLASGVPSRFSGSGSGTDYTLTISSLQPEDFATYYCQQWNYPLLTFGQGTKLEIK

SEQ ID NO: 1183 - protein, 106 aa, synthetic construct
AIRLTQSPFSLSASVGDRVTITCSASSSVSYMHWYQQKPAKAPKLFIYEISKLASGVPSRFSGSGSGTDYTLTISSLQPEDFATYYCQQWNYPLLTFGQGTKLEIK

SEQ ID NO: 1184 - protein, 106 aa, synthetic construct
DIVLTQSPDSLAVSLGERATINCSASSSVSYMHWYQQKPGQPPKLLIYEISKLASGVPDRFSGSGSGTDYTLTISSLQAEDVAVYYCQQWNYPLLTFGQGTKLEIK

SEQ ID NO: 1185 - protein, 5 aa, synthetic construct
GSWMN

SEQ ID NO: 1186 - protein, 17 aa, synthetic construct
RIYPGDGDTDYSGKFKG

SEQ ID NO: 1187 - protein, 12 aa, synthetic construct
SGYFNYVPVFDY

SEQ ID NO: 1188 - protein, 7 aa, synthetic construct
GYTFSGS

SEQ ID NO: 1189 - protein, 6 aa, synthetic construct
YPGDGD

SEQ ID NO: 1190 - protein, 10 aa, synthetic construct
GYTFSGSWMN

SEQ ID NO: 1191 - protein, 10 aa, synthetic construct
SANSTVGYIH

SEQ ID NO: 1192 - protein, 7 aa, synthetic construct
TTSNLAS

SEQ ID NO: 1193 - protein, 8 aa, synthetic construct
HQWSFYPT

SEQ ID NO: 1194 - protein, 6 aa, synthetic construct
NSTVGY

SEQ ID NO: 1195 - protein, 105 aa, synthetic construct
QIVLTQSPAIMSASLGEEIALTCSANSTVGYIHWYQQKSGTSPKLLIYTTSNLASGVPSRFSGSGSGTFYSLTISSVEAEDAADYFCHQWSFYPTFGGGTKLEIK

SEQ ID NO: 1196 - protein, 121 aa, synthetic construct
QIQLQQSGPEVVKPGASVQISCKASGYTFSGSWMNWVKQRPGKGLEWIGRIYPGDGDTDYSGKFKGRATLTADKSSSTAYMRLSSLTSEDSAVYFCARSGYFNYVPVFDYWGQGTTLSVSS

SEQ ID NO: 1197 - protein, 121 aa, synthetic construct
QIQLVQSGAEVKKPGASVKVSCKASGYTFSGSWMNWVRQAPGQGLEWIGRIYPGDGDTDYSGKFKGRATLTADKSTSTAYMELSSLRSEDTAVYYCARSGYFNYVPVFDYWGQGTTVTVSS

SEQ ID NO: 1198 - protein, 121 aa, synthetic construct
QIQLVQSGAEVKKPGSSVKVSCKASGYTFSGSWMNWVRQAPGQGLEWIGRIYPGDGDTDYSGKFKGRATLTADKSTSTAYMELSSLRSEDTAVYYCARSGYFNYVPVFDYWGQGTTVTVSS

SEQ ID NO: 1199 - protein, 121 aa, synthetic construct
EIQLVQSGAEVKKPGESLKISCKASGYTFSGSWMNWVRQMPGKGLEWIGRIYPGDGDTDYSGKFKGQATLSADKSISTAYLQWSSLKASDTAMYYCARSGYFNYVPVFDYWGQGTTVTVSS

SEQ ID NO: 1200 - protein, 121 aa, synthetic construct
QIQLVQSGSELKKPGASVKVSCKASGYTFSGSWMNWVRQAPGQGLEWIGRIYPGDGDTDYSGKFKGRAVLSADKSVSTAYLQISSLKAEDTAVYYCARSGYFNYVPVFDYWGQGTTVTVSS

SEQ ID NO: 1201 - protein, 121 aa, synthetic construct
QIQLVQSGSELKKPGASVKVSCKASGYTFSGSWMNWVRQAPGQGLEWIGRIYPGDGDTDYSGKFKGRAVLSADKSVSMAYLQISSLKAEDTAVYYCARSGYFNYVPVFDYWGQGTTVTVSS

SEQ ID NO: 1202 - protein, 121 aa, synthetic construct
EIQLVESGGGLVQPGRSLRLSCTASGYTFSGSWMNWVRQAPGKGLEWIGRIYPGDGDTDYSGKFKGRATLSADKSKSIAYLQMNSLKTEDTAVYYCARSGYFNYVPVFDYWGQGTTVTVSS

SEQ ID NO: 1203 - protein, 105 aa, synthetic construct
EIVLTQSPATLSLSPGERATLSCSANSTVGYIHWYQQKPGQAPKLLIYTTSNLASGIPARFSGSGSGTDYTLTISSLEPEDFAVYFCHQWSFYPTFGQGTKLEIK

SEQ ID NO: 1204 - protein, 105 aa, synthetic construct
DIQLTQSPSFLSASVGDRVTITCSANSTVGYIHWYQQKPGKAPKLLIYTTSNLASGVPSRFSGSGSGTEYTLTISSLQPEDFATYFCHQWSFYPTFGQGTKLEIK

SEQ ID NO: 1205 - protein, 105 aa, synthetic construct
EIVLTQSPATLSLSPGERATLSCSANSTVGYIHWYQQKPGQAPKLLIYTTSNLASGIPARFSGSGPGTDYTLTISSLEPEDFAVYFCHQWSFYPTFGQGTKLEIK

SEQ ID NO: 1206 - protein, 105 aa, synthetic construct
DIVLTQSPDSLAVSLGERATINCSANSTVGYIHWYQQKPGQPPKLLIYTTSNLASGVPDRFSGSGSGTDYTLTISSLQAEDVAVYFCHQWSFYPTFGQGTKLEIK

SEQ ID NO: 1207 - protein, 105 aa, synthetic construct
EIVLTQSPDFQSVTPKEKVTITCSANSTVGYIHWYQQKPDQSPKLLIYTTSNLASGVPSRFSGSGSGTDYTLTINSLEAEDAATYFCHQWSFYPTFGQGTKLEIK

SEQ ID NO: 1208 - protein, 5 aa, synthetic construct
DYYMY

SEQ ID NO: 1209 - protein, 17 aa, synthetic construct
TISGGGSYTYSPDSVKG

SEQ ID NO: 1210 - protein, 14 aa, synthetic construct
ERDIYYGNFNAMVY

SEQ ID NO: 1211 - protein, 7 aa, synthetic construct
GFTFSDY

SEQ ID NO: 1212 - protein, 6 aa, synthetic construct
SGGGSY

SEQ ID NO: 1213 - protein, 10 aa, synthetic construct
GFTFSDYYMY

SEQ ID NO: 1214 - protein, 15 aa, synthetic construct
RASKSVSTSGYSYMH

SEQ ID NO: 1215 - protein, 7 aa, synthetic construct
LASNLES

SEQ ID NO: 1216 - protein, 9 aa, synthetic construct
QHSRDLPWT

SEQ ID NO: 1217 - protein, 11 aa, synthetic construct
SKSVSTSGYSY

SEQ ID NO: 1218 - protein, 111 aa, synthetic construct
DIVLTQSPVSLTVSLGQRATISCRASKSVSTSGYSYMHWYQQKPGQPPKLLIYLASNLESGVPARFSGSGSGTDFTLNIHPVEEEDAATYYCQHSRDLPWTFGGGTKLEIK

SEQ ID NO: 1219 - protein, 123 aa, synthetic construct
EVQLVESGGGLVKPGGSLKLSCAASGFTFSDYYMYWVRQTPEKRLEWVATISGGGSYTYSPDSVKGRFTISRDNAKNNLYLQMSSLRSEDTAMYFCARERDIYYGNFNAMVYWGRGTSVTVSS

SEQ ID NO: 1220 - protein, 123 aa, synthetic construct
EVQLLESGGGLVQPGGSLRLSCAASGFTFSDYYMYWVRQAPGKGLEWVATISGGGSYTYSPDSVKGRFTISRDNSKNTLYLQMNSLRAEDTAVYYCARERDIYYGNFNAMVYWGRGTLVTVSS

SEQ ID NO: 1221 - protein, 123 aa, synthetic construct
EVQLVESGGGLVQPGGSLRLSCAASGFTFSDYYMYWVRQAPGKGLEWVATISGGGSYTYSPDSVKGRFTISRDNAKNSLYLQMNSLRAEDTAVYYCARERDIYYGNFNAMVYWGRGTLVTVSS

SEQ ID NO: 1222 - protein, 123 aa, synthetic construct
QVQLVESGGGVVQPGRSLRLSCAASGFTFSDYYMYWVRQAPGKGLEWVATISGGGSYTYSPDSVKGRFTISRDNSKNTLYLQMNSLRAEDTAVYYCARERDIYYGNFNAMVYWGRGTLVTVSS

SEQ ID NO: 1223 - protein, 123 aa, synthetic construct
QVQLVESGGGLVKPGGSLRLSCAASGFTFSDYYMYWIRQAPGKGLEWVATISGGGSYTYSPDSVKGRFTISRDNAKNSLYLQMNSLRAEDTAVYYCARERDIYYGNFNAMVYWGRGTLVTVSS

SEQ ID NO: 1224 - protein, 111 aa, synthetic construct
EIVLTQSPGTLSLSPGERATLSCRASKSVSTSGYSYMHWYQQKPGQAPRLLIYLASNLESGIPDRFSGSGSGTDFTLTISRLEPEDFAVYYCQHSRDLPWTFGGGTKVEIK

SEQ ID NO: 1225 - protein, 111 aa, synthetic construct
EIVLTQSPATLSLSPGERATLSCRASKSVSTSGYSYMHWYQQKPGQAPRLLIYLASNLESGIPARFSGSGSGTDFTLTISSLEPEDFAVYYCQHSRDLPWTFGGGTKVEIK

SEQ ID NO: 1226 - protein, 111 aa, synthetic construct
DIQLTQSPSTLSASVGDRVTITCRASKSVSTSGYSYMHWYQQKPGKAPKLLIYLASNLESGVPSRFSGSGSGTEFTLTISSLQPDDFATYYCQHSRDLPWTFGGGTKVEIK

SEQ ID NO: 1227 - protein, 111 aa, synthetic construct
AIQLTQSPSSLSASVGDRVTITCRASKSVSTSGYSYMHWYQQKPGKAPKLLIYLASNLESGVPSRFSGSGSGTDFTLTISSLQPEDFATYYCQHSRDLPWTFGGGTKVEIK

SEQ ID NO: 1228 - skipped

SEQ ID NO: 1229 - protein, 5 aa, synthetic construct
GYFWN

SEQ ID NO: 1230 - protein, 16 aa, synthetic construct
YISYDGSNNYNPSLKN

SEQ ID NO: 1231 - protein, 11 aa, synthetic construct
PSPGTGYAVDY

SEQ ID NO: 1232 - protein, 8 aa, synthetic construct
GYSITSGY

SEQ ID NO: 1233 - protein, 6 aa, synthetic construct
SYDGSN

SEQ ID NO: 1234 - protein, 11 aa, synthetic construct
GYSITSGYFWN

SEQ ID NO: 1235 - protein, 16 aa, synthetic construct
RSSQSLVHSNGNTYLH

SEQ ID NO: 1236 - protein, 7 aa, synthetic construct
KVSNRFS

SEQ ID NO: 1237 - protein, 9 aa, synthetic construct
SQSTHVPFT

SEQ ID NO: 1238 - protein, 12 aa, synthetic construct
SQSLVHSNGNTY

SEQ ID NO: 1239 - protein, 112 aa, synthetic construct
NVVMTQTPLSLPVSLGDQASISCRSSQSLVHSNGNTYLHWYLQKPGQSPKFLIYKVSNRFSGVPDRFSGGGSGTEFTLKISRVEAEDLGVYFCSQSTHVPFTFGSGTKLEIK

SEQ ID NO: 1240 - protein, 120 aa, synthetic construct
NVQLQESGPGLVKPSQSLSLTCSVAGYSITSGYFWNWIRQFPGNKLEWMGYISYDGSNNYNPSLKNRISITRDTSKNQFFLKLNSVTTEDTATYYCASPSPGTGYAVDYWGQGTSVTVSS

SEQ ID NO: 1241 - protein, 120 aa, synthetic construct
QVQLQESGPGLVKPSETLSLTCTVSGYSITSGYFWNWIRQPPGKGLEWIGYISYDGSNNYNPSLKNRVTISRDTSKNQFSLKLSSVTAADTAVYYCASPSPGTGYAVDYWGQGTLVTVSS

SEQ ID NO: 1242 - protein, 120 aa, synthetic construct; identical to SEQ ID NO: 1241

SEQ ID NO: 1243 - protein, 120 aa, synthetic construct
QVQLVESGGGLVQPGGSLRLSCSVSGYSITSGYFWNWVRQAPGKGLEWVGYISYDGSNNYNPSLKNRFTISRDTSKNTFYLQMNSLRAEDTAVYYCASPSPGTGYAVDYWGQGTLVTVSS

SEQ ID NO: 1244 - protein, 111 aa, synthetic construct
VVMTQSPGTLSLSPGERATLSCRSSQSLVHSNGNTYLHWYQQKPGQAPRFLIYKVSNRFSGIPDRFSGSGSGTDFTLTISRLEPEDFAVYFCSQSTHVPFTFGQGTKLEIK

SEQ ID NO: 1245 - protein, 112 aa, synthetic construct
EVVMTQSPATLSLSPGERATLSCRSSQSLVHSNGNTYLHWYQQKPGQAPRFLIYKVSNRFSGIPARFSGSGSGTDFTLTISSLEPEDFAVYFCSQSTHVPFTFGQGTKLEIK

SEQ ID NO: 1246 - protein, 112 aa, synthetic construct
EVVMTQSPATLSVSPGERATLSCRSSQSLVHSNGNTYLHWYQQKPGQAPRFLIYKVSNRFSGIPARFSGSGSGTEFTLTISSLQSEDFAVYFCSQSTHVPFTFGQGTKLEIK

SEQ ID NO: 1247 - protein, 112 aa, synthetic construct
DVQMTQSPSSLSASVGDRVTITCRSSQSLVHSNGNTYLHWYQQKPGKAPKFLIYKVSNRFSGVPSRFSGSGSGTDFTFTISSLQPEDIATYFCSQSTHVPFTFGQGTKLEIK

SEQ ID NO: 1248 - protein, 5 aa, synthetic construct
DYIVH

SEQ ID NO: 1249 - protein, 17 aa, synthetic construct
WINTYTGTPTYADDFEG

SEQ ID NO: 1250 - protein, 13 aa, synthetic construct
SWRRGIRGIGFDY

SEQ ID NO: 1251 - protein, 7 aa, synthetic construct
GYTFTDY

SEQ ID NO: 1252 - protein, 6 aa, synthetic construct
NTYTGT

SEQ ID NO: 1253 - protein, 10 aa, synthetic construct
GYTFTDYIVH

SEQ ID NO: 1254 - protein, 11 aa, synthetic construct
KASKSINKYLA

SEQ ID NO: 1255 - protein, 7 aa, synthetic construct
DGSTLQS

SEQ ID NO: 1256 - protein, 9 aa, synthetic construct
QQHNEYPPT

SEQ ID NO: 1257 - protein, 7 aa, synthetic construct
SKSINKY

SEQ ID NO: 1258 - protein, 107 aa, synthetic construct
DVQMTQSPYNLAASPGESVSINCKASKSINKYLAWYQQKPGKPNKLLIYDGSTLQSGIPSRFSGSGSGTDFTLTIRGLEPEDFGLYYCQQHNEYPPTFGAGTKLELK

SEQ ID NO: 1259 - protein, 122 aa, synthetic construct
QLQLVQSGPELREPGESVKISCKASGYTFTDYIVHWVKQAPGKGLKWMGWINTYTGTPTYADDFEGRFVFSLEASASTANLQISNLKNEDTATYFCARSWRRGIRGIGFDYWGQGVMVTVSS

SEQ ID NO: 1260 - protein, 122 aa, synthetic construct
QLQLVQSGAEVKKPGASVKVSCKASGYTFTDYIVHWVRQAPGQGLEWMGWINTYTGTPTYADDFEGWVTMTLDASISTAYMELSRLRSDDTAVYYCARSWRRGIRGIGFDYWGQGTMVTVSS

SEQ ID NO: 1261 - protein, 122 aa, synthetic construct
QLQLVQSGAEVKKPGASVKVSCKASGYTFTDYIVHWVRQAPGQGLEWMGWINTYTGTPTYADDFEGRVTMTLDASTSTAYMELSSLRSEDTAVYYCARSWRRGIRGIGFDYWGQGTMVTVSS

SEQ ID NO: 1262 - protein, 122 aa, synthetic construct
QLQLVQSGAEVKKPGASVKVSCKASGYTFTDYIVHWVRQAPGQRLEWMGWINTYTGTPTYADDFEGRVTITLDASASTAYMELSSLRSEDMAVYYCARSWRRGIRGIGFDYWGQGTMVTVSS

SEQ ID NO: 1263 - protein, 122 aa, synthetic construct
QLQLVQSGAEVKKPGASVKVSCKASGYTFTDYIVHWVRQATGQGLEWMGWINTYTGTPTYADDFEGRVTMTLNASISTAYMELSSLRSEDTAVYYCARSWRRGIRGIGFDYWGQGTMVTVSS

SEQ ID NO: 1264 - protein, 107 aa, synthetic construct
EVVMTQSPGTLSLSPGERATLSCKASKSINKYLAWYQQKPGQAPRLLIYDGSTLQSGIPDRFSGSGSGTDFTLTISRLEPEDFAVYYCQQHNEYPPTFGQGTKLEIK

SEQ ID NO: 1265 - protein, 107 aa, synthetic construct
EVVMTQSPATLSLSPGERATLSCKASKSINKYLAWYQQKPGQAPRLLIYDGSTLQSGIPARFSGSGSGTDFTLTISSLEPEDFAVYYCQQHNEYPPTFGQGTKLEIK

SEQ ID NO: 1266 - protein, 107 aa, synthetic construct
DVQMTQSPSSLSASVGDRVTITCKASKSINKYLAWYQQKPGKAPKLLIYDGSTLQSGVPSRFSGSGSGTDFTLTISSLQPEDFATYYCQQHNEYPPTFGQGTKLEIK

SEQ ID NO: 1267 - protein, 107 aa, synthetic construct
AVRMTQSPSSFSASTGDRVTITCKASKSINKYLAWYQQKPGKAPKLLIYDGSTLQSGVPSRFSGSGSGTDFTLTISCLQSEDFATYYCQQHNEYPPTFGQGTKLEIK

SEQ ID NO: 1268 - protein, 5 aa, synthetic construct
NYGVH

SEQ ID NO: 1269 - protein, 16 aa, synthetic construct
VIWSDGSTDYDTAFIS

SEQ ID NO: 1270 - protein, 9 aa, synthetic construct
RAVVADFDY

SEQ ID NO: 1271 - protein, 6 aa, synthetic construct
GFSLTN

SEQ ID NO: 1272 - protein, 9 aa, synthetic construct
VIWSDGSTD

SEQ ID NO: 1273 - protein, 10 aa, synthetic construct
GFSLTNYGVH

SEQ ID NO: 1274 - protein, 117 aa, synthetic construct
QVQLKQSGPGLLQPSQSLSITCTVSGFSLTNYGVHWVRQSPGKGLEWLGVIWSDGSTDYDTAFISRLSISKDNSKSQVFFKLNSLQADDTAIYYCARRAVVADFDYWGQGTTLTVSS

SEQ ID NO: 1275 - protein, 16 aa, synthetic construct
KASKEVTIFGSISALH

SEQ ID NO: 1276 - protein, 7 aa, synthetic construct
NGAKLES

SEQ ID NO: 1277 - protein, 9 aa, synthetic construct
LQNKEVPFT

SEQ ID NO: 1278 - protein, 119 aa, synthetic construct
DIVLTQSPASLAVSLGQKATISCKASKEVTIFGSISALHWYQQKPGQPPKLIYNGAKLESGVSARFSDSGSQNRSPFGNQLSFTLTIAPVEADDAATYYCLQNKEVPFTFGSGTKLEIK

SEQ ID NO: 1279 - protein, 117 aa, synthetic construct
DIVLTQSPDSLAVSLGERATINCKASKEVTIFGSISALHWYQQKPGQPPKLLYNGAKLESGVSARFGVPDRFSRSGSGLDFTLTISSLQAEDVAVYYCLQNKEVPFTFGQGTKLEIK

SEQ ID NO: 1280 - protein, 117 aa, synthetic construct
EIVLTQSPDFQSVTPKEKVTITCKASKEVTIFGSISALHWYQQKPDQSPKLLYNGAKLESGVSARFGVPSRFSRSGSGLDFTLTINSLEAEDAATYYCLQNKEVPFTFGQGTKLEIK

SEQ ID NO: 1281 - protein, 117 aa, synthetic construct
AIQLTQSPSSLSASVGDRVTITCKASKEVTIFGSISALHWYQQKPGKAPKLLYNGAKLESGVSARFGVPSRFSRSGSGLDFTLTISSLQPEDFATYYCLQNKEVPFTFGQGTKLEIK

SEQ ID NO: 1282 - protein, 117 aa, synthetic construct
DIVLTQTPLSLSVTPGQPASISCKASKEVTIFGSISALHWYLQKPGQPPKLLYNGAKLESGVSARFGVPDRFSRSGSGLDFTLKISRVEAEDVGVYYCLQNKEVPFTFGQGTKLEIK

SEQ ID NO: 1283 - protein, 117 aa, synthetic construct
QVTLKESGPVLVKPTETLTLTCTVSGFSLTNYGVHWVRQPPGKALEWLGVIWSDGSTDYDTAFISRLTISKDNSKSQVVLTMTNMDPVDTATYYCARRAVVADFDYWGQGTTVTVSS

SEQ ID NO: 1284 - protein, 117 aa, synthetic construct
QVQLQESGPGLVKPSGTLSLTCAVSGFSLTNYGVHWVRQPPGKGLEWLGVIWSDGSTDYDTAFISRLTISKDNSKSQVSLKLSSVTAADTAVYYCARRAVVADFDYWGQGTTVTVSS

SEQ ID NO: 1285 - protein, 117 aa, synthetic construct
QVQLQQSGPGLVKPSQTLSLTCAVSGFSLTNYGVHWVRQSPSRGLEWLGVIWSDGSTDYDTAFISRLTINKDNSKSQVSLQLNSVTPEDTAVYYCARRAVVADFDYWGQGTTVTVSS

SEQ ID NO: 1286 - protein, 117 aa, synthetic construct
EVQLVESGGGLVQPGPSLRLSCTVSGFSLTNYGVHWVRQAPGKGLEWLGVIWSDGSTDYDTAFISRLTISKDNSKSIVYLQMNSLKTEDTAVYYCARRAVVADFDYWGQGTTVTVSS

SEQ ID NO: 1287 - protein, 117 aa, synthetic construct
EVQLVQSGAEVKKPGESLRISCKVSGFSLTNYGVHWVRQMPGKGLEWLGVIWSDGSTDYDTAFISQLTISKDNSISTVYLQWSSLKASDTAMYYCARRAVVADFDYWGQGTTVTVSS

SEQ ID NO: 1288 - protein, 5 aa, synthetic construct
SYGMS

SEQ ID NO: 1289 - protein, 17 aa, synthetic construct
LISSGGSYTYYTDSVKG

SEQ ID NO: 1290 - protein, 8 aa, synthetic construct
HGGNFFDY

SEQ ID NO: 1291 - protein, 7 aa, synthetic construct
GFTFRSY

SEQ ID NO: 1292 - protein, 6 aa, synthetic construct
SSGGSY

SEQ ID NO: 1293 - protein, 10 aa, synthetic construct
GFTFRSYGMS

SEQ ID NO: 1294 - protein, 10 aa, synthetic construct
SVSSSVSYMH

SEQ ID NO: 1295 - protein, 7 aa, synthetic construct
DTSKLAS

SEQ ID NO: 1296 - protein, 10 aa, synthetic construct
QQWSSNPQYT

SEQ ID NO: 1297 - protein, 6 aa, synthetic construct
SSSVSY

SEQ ID NO: 1298 - protein, 5 aa, synthetic construct
SSWMN

SEQ ID NO: 1299 - protein, 17 aa, synthetic construct
RIYPGDGDTKYNGKFKG

SEQ ID NO: 1300 - protein, 10 aa, synthetic construct
RGTGGWYFDV

SEQ ID NO: 1301 - protein, 10 aa, synthetic construct
RGTGGWYFDV

SEQ ID NO: 1302 - protein, 7 aa, synthetic construct
GYAFSSS

SEQ ID NO: 1303 - protein, 6 aa, synthetic construct
YPGDGD

SEQ ID NO: 1304 - protein, 10 aa, synthetic construct
GYAFSSSWMN

SEQ ID NO: 1305 - protein, 15 aa, synthetic construct
RASESVDSSGNSFMH

SEQ ID NO: 1306 - protein, 7 aa, synthetic construct
RASNLES

SEQ ID NO: 1307 - protein, 9 aa, synthetic construct
QQSFDDPFT

SEQ ID NO: 1308 - protein, 11 aa, synthetic construct
SESVDSSGNSF

SEQ ID NO: 1309 - protein, 246 aa, synthetic construct
QVQLVQSGAEVKKPGSSVKVSCKASGHDFDKFYIHWVRQAPGQGLEWMGRVSAGSGNVKYNEKFKGRVTITADTSTSTAYMELSSLRSEDTAVYYCAGSYYSYDVLDYWGQGTTVTVSSGGGGSGGGGSGGGGSGGGGSDIQMTQSPSFLSASVGDRVTITCKASQNVGNRVAWYQQKPGKAPKALIYSSSHRYKGVPSRFSGSGSGTEFTLTISSLQPEDFATYFCQQFKSYPLTFGQGTKLEIK

SEQ ID NO: 1310 - protein, 119 aa, synthetic construct; identical to SEQ ID NO: 94

SEQ ID NO: 1311 - protein, 119 aa, synthetic construct
QVQLVQSGAEVKKPGSSVKVSCKASGTDFKLTYIHWVRQAPGQGLEWMGRIFPGSGNVKYNEKFKGRVTITADTSTSTAYMELSSLRSEDTAVYYCAVSYYSYDVLDYWGQGTTVTVSS

SEQ ID NO: 1312 - protein, 119 aa, synthetic construct
QVQLVQSGAEVKKPGSSVKVSCKASGHDFRLTYIHWVRQAPGQGLEWMGRISAGSGNVKYNEKFKGRVTITADTSTSTAYMELSSLRSEDTAVYYCAVSYYSYDVLDYWGQGTTVTVSS

SEQ ID NO: 1313 - protein, 107 aa, synthetic construct; identical to SEQ ID NO: 90

SEQ ID NO: 1314 - protein, 107 aa, synthetic construct; identical to SEQ ID NO: 141

SEQ ID NO: 1315 - protein, 5 aa, synthetic construct
AYGVN

SEQ ID NO: 1316 - protein, 16 aa, synthetic construct
MIWGDGNTDYNSALKS

SEQ ID NO: 1317 - protein, 12 aa, synthetic construct
DRVTATLYAMDY

SEQ ID NO: 1318 - protein, 7 aa, synthetic construct
GFSLTAY

SEQ ID NO: 1319 - protein, 5 aa, synthetic construct
WGDGN

SEQ ID NO: 1320 - protein, 10 aa, synthetic construct
GFSLTAYGVN

SEQ ID NO: 1321 - protein, 11 aa, synthetic construct
SASQGISNYLN

SEQ ID NO: 1322 - protein, 7 aa, synthetic construct
YTSSLHS

SEQ ID NO: 1323 - protein, 9 aa, synthetic construct
QQYSKLPRT

SEQ ID NO: 1324 - protein, 107 aa, synthetic construct
DIQMTQSPSSLSASVGDRVTITCSASQGISNYLNWYQQTPGKAPKLLIYYTSSLHSGVPSRFSGSGSGTDYTFTISSLQPEDIATYYCQQYSKLPRTFGQGTKLQIT

SEQ ID NO: 1325 - protein, 120 aa, synthetic construct
QVQLQESGPGLVRPSQTLSLTCTVSGFSLTAYGVNWVRQPPGRGLEWLGMIWGDGNTDYNSALKSRVTMLKDTSKNQFSLRLSSVTAADTAVYYCARDRVTATLYAMDYWGQGSLVTVSS

SEQ ID NO: 1326 - protein, 246 aa, synthetic construct
QVQLVQSGAEVKKPGSSVKVSCKASGHDFRLTYIHWVRQAPGQGLEWMGRVSAGSGNTKYNEKFKGRVTITADTSTSTAYMELSSLRSEDTAVYYCAVSYYSYDVLDYWGQGTTVTVSSGGGGSGGGGSGGGGSGGGGSDIQMTQSPSFLSASVGDRVTITCKASQNVGDRVVWHQQKPGKAPKALIYSSSHRYKGVPSRFSGSGSGTEFTLTISSLQPEDFATYFCQQFKSYPLTFGQGTKLEIK

SEQ ID NO: 1327 - protein, 246 aa, synthetic construct
QVQLVQSGAEVKKPGSSVKVSCKASGHDFRLTYIHWVRQAPGQGLEWMGRVSAGSGNVKYNEKFKGRVTITADTSTSTAYMELSSLRSEDTAVYYCAVSYYSYDVLDYWGQGTTVTVSSGGGGSGGGGSGGGGSGGGGSDIQMTQSPSFLSASVGDRVTITCKASQNVGNRVVWHQQKPGKAPKALIYSSSHRYKGVPSRFSGSGSGTEFTLTISSLQPEDFATYFCQQFKSYPLTFGQGTKLEIK

SEQ ID NO: 1328 - protein, 246 aa, synthetic construct
QVQLVQSGAEVKKPGSSVKVSCKASGHDFRLTYIHWVRQAPGQGLEWMGRIYAGSGNVKYNEKFKGRVTITADTSTSTAYMELSSLRSEDTAVYYCAVSYYSYDVLDYWGQGTTVTVSSGGGGSGGGGSGGGGSGGGGSDIQMTQSPSFLSASVGDRVTITCKASQNVADRVVWHQQKPGKAPKALIYSSSHRYKGVPSRFSGSGSGTEFTLTISSLQPEDFATYFCQQFKSYPLTFGQGTKLEIK

SEQ ID NO: 1329 - protein, 246 aa, synthetic construct
QVQLVQSGAEVKKPGSSVKVSCKASGHDFKLTYIHWVRQAPGQGLEWMGRVSAGSGNTKYNEKFKGRVTITADTSTSTAYMELSSLRSEDTAVYYCAVSYYSYDVLDYWGQGTTVTVSSGGGGSGGGGSGGGGSGGGGSDIQMTQSPSFLSASVGDRVTITCKASQNVGDRVAWHQQKPGKAPKALIYSSSHRYKGVPSRFSGSGSGTEFTLTISSLQPEDFATYFCQQFKSYPLTFGQGTKLEIK

SEQ ID NO: 1330 - protein, 246 aa, synthetic construct
QVQLVQSGAEVKKPGSSVKVSCKASGHDFKLTYIHWVRQAPGQGLEWMGRVSAGSGNTKYNEKFKGRVTITADTSTSTAYMELSSLRSEDTAVYYCAVSYYSYDVLDYWGQGTTVTVSSGGGGSGGGGSGGGGSGGGGSDIQMTQSPSFLSASVGDRVTITCKASQNVDNRVAWHQQKPGKAPKALIYSSSHRYKGVPSRFSGSGSGTEFTLTISSLQPEDFATYFCQQFKSYPLTFGQGTKLEIK

SEQ ID NO: 1331 - protein, 246 aa, synthetic construct
QVQLVQSGAEVKKPGSSVKVSCKASGHDFRLTYIHWVRQAPGQGLEWMGRVSAGSGNVKYNEKFKGRVTITADTSTSTAYMELSSLRSEDTAVYYCAVSYYSYDVLDYWGQGTTVTVSSGGGGSGGGGSGGGGSGGGGSDIQMTQSPSFLSASVGDRVTITCKASQNVADRVVWHQQKPGKAPKALIYSSSHRYKGVPSRFSGSGSGTEFTLTISSLQPEDFATYFCQQFKSYPLTFGQGTKLEIK

SEQ ID NO: 1332 - protein, 246 aa, synthetic construct
QVQLVQSGAEVKKPGSSVKVSCKASGHDFRLTYIHWVRQAPGQGLEWMGRVYAGSGNTKYNEKFKGRVTITADTSTSTAYMELSSLRSEDTAVYYCAVSYYSYDVLDYWGQGTTVTVSSGGGGSGGGGSGGGGSGGGGSDIQMTQSPSFLSASVGDRVTITCKASQNVEDRVVWHQQKPGKAPKALIYSSSHRYKGVPSRFSGSGSGTEFTLTISSLQPEDFATYFCQQFKSYPLTFGQGTKLEIK

SEQ ID NO: 1333 - protein, 246 aa, synthetic construct
QVQLVQSGAEVKKPGSSVKVSCKASGHDFKLTYIHWVRQAPGQGLEWMGRVSAGSGNTKYNEKFKGRVTITADTSTSTAYMELSSLRSEDTAVYYCAVSYYSYDVLDYWGQGTTVTVSSGGGGSGGGGSGGGGSGGGGSDIQMTQSPSFLSASVGDRVTITCKASQNVADRVVWHQQKPGKAPKALIYSSSHRYKGVPSRFSGSGSGTEFTLTISSLQPEDFATYFCQQFKSYPLTFGQGTKLEIK

SEQ ID NO: 1334 - protein, 246 aa, synthetic construct
QVQLVQSGAEVKKPGSSVKVSCKASGHDFKLTYIHWVRQAPGQGLEWMGRISAGSGNTKYNEKFKGRVTITADTSTSTAYMELSSLRSEDTAVYYCAVSYYSYDVLDYWGQGTTVTVSSGGGGSGGGGSGGGGSGGGGSDIQMTQSPSFLSASVGDRVTITCKASQNVGDRVVWHQQKPGKAPKALIYSSSHRYKGVPSRFSGSGSGTEFTLTISSLQPEDFATYFCQQFKSYPLTFGQGTKLEIK

SEQ ID NO: 1335 - protein, 246 aa, synthetic construct
QVQLVQSGAEVKKPGSSVKVSCKASGHDFKLTYIHWVRQAPGQGLEWMGRIYAGSGNTKYNEKFKGRVTITADTSTSTAYMELSSLRSEDTAVYYCAVSYYSYDVLDYWGQGTTVTVSSGGGGSGGGGSGGGGSGGGGSDIQMTQSPSFLSASVGDRVTITCKASQNVGDRVVWHQQKPGKAPKALIYSSSHRYKGVPSRFSGSGSGTEFTLTISSLQPEDFATYFCQQFKSYPLTFGQGTKLEIK

SEQ ID NO: 1336 - protein, 246 aa, synthetic construct
QVQLVQSGAEVKKPGSSVKVSCKASGTDFKLTYIHWVRQAPGQGLEWMGRIFPGSGNVKYNEKFKGRVTITADTSTSTAYMELSSLRSEDTAVYYCAVSYYSYDVLDYWGQGTTVTVSSGGGGSGGGGSGGGGSGGGGSDIQMTQSPSFLSASVGDRVTITCKASQNVDNRVAWYQQKPGKAPKALIYSSSHRYKGVPSRFSGSGSGTEFTLTISSLQPEDFATYFCQQFKSYPLTFGQGTKLEIK

SEQ ID NO: 1337 - protein, 246 aa, synthetic construct
QVQLVQSGAEVKKPGSSVKVSCKASGHDFRLTYIHWVRQAPGQGLEWMGRISAGSGNVKYNEKFKGRVTITADTSTSTAYMELSSLRSEDTAVYYCAVSYYSYDVLDYWGQGTTVTVSSGGGGSGGGGSGGGGSGGGGSDIQMTQSPSFLSASVGDRVTITCKASQNVADRVAWYQQKPGKAPKALIYSSSHRYKGVPSRFSGSGSGTEFTLTISSLQPEDFATYFCQQFKSYPLTFGQGTKLEIK

SEQ ID NO: 1338 - protein, 243 aa, synthetic construct
EVQLVESGGGLVQPGGSLRLSCAASGFTFSNFGMHWVRQAPGKGLEWVSYISSGSSTIYYADTLKGRFTISRDNSKNTLYLQMNSLRAEDTAVYYCARRGEGAMDYWGQGTTVTVSSGGGGSGGGGSGGGGSGGGGSDNQLTQSPSSLSASVGDRVTITCRASSSVNYIYWYQQKPGKAPKLLIYYTSNLAPGVPSRFSGSGSGNDYTLTISSLQPEDFATYYCQQFTSSPFTFGQGTKLEIK

SEQ ID NO: 1339 - protein, 242 aa, synthetic construct
EVQLVESGGGLVQPGGSLRLSCAASGFTFSNFGMHWVRQAPGKGLEWVSYISSGSSTIYYADTLKGRFTISRDNSKNTLYLQMNSLRAEDTAVYYCARRGEGAMDYWGQGTTVTVSSGGGGSGGGGSGGGGSGGGGSSNELTQPPSVSVSPGQTARITCRASSSVNYIYWYQQKSGQAPVLVIYYTSNLAPGIPERFSGSGSGNMYTLTISGAQVEDEADYYCQQFTSSPFTFGTGTKVTVL

SEQ ID NO: 1340 - protein, 243 aa, synthetic construct
QVQLVESGGGVVQPGRSLRLSCAASGFTFSNFGMHWVRQAPGKGLEWVAYISSGSSTIYYADTLKGRFTISRDNSKNTLYLQMNSLRAEDTAVYYCARRGEGAMDYWGQGTTVTVSSGGGGSGGGGSGGGGSGGGGSDNQLTQSPSFLSASVGDRVTITCRASSSVNYIYWYQQKPGKAPKLLIYYTSNLAPGVPSRFSGSGSGNEYTLTISSLQPEDFATYYCQQFTSSPFTFGQGTKLEIK

SEQ ID NO: 1341 - protein, 243 aa, synthetic construct
QVQLVESGGGVVQPGRSLRLSCAASGFTFSNFGMHWVRQAPGKGLEWVAYISSGSSTIYYADTLKGRFTISRDNSKNTLYLQMNSLRAEDTAVYYCARRGEGAMDYWGQGTTVTVSSGGGGSGGGGSGGGGSGGGGSDNQLTQSPSSLSASVGDRVTITCRASSSVNYIYWYQQKPGKAPKLLIYYTSNLAPGVPSRFSGSGSGNDYTLTISSLQPEDFATYYCQQFTSSPFTFGQGTKLEIK

SEQ ID NO: 1342 - protein, 242 aa, synthetic construct
QVQLVESGGGVVQPGRSLRLSCAASGFTFSNFGMHWVRQAPGKGLEWVAYISSGSSTIYYADTLKGRFTISRDNSKNTLYLQMNSLRAEDTAVYYCARRGEGAMDYWGQGTTVTVSSGGGGSGGGGSGGGGSGGGGSSNELTQPPSVSVSPGQTARITCRASSSVNYIYWYQQKSGQAPVLVIYYTSNLAPGIPERFSGSGSGNMYTLTISGAQVEDEADYYCQQFTSSPFTFGTGTKVTVL

SEQ ID NO: 1343 - skipped

SEQ ID NO: 1344 - protein, 119 aa, synthetic construct
QVQLVQSGAEVKKPGSSVKVSCKASGHDFRLTYIHWVRQAPGQGLEWMGRVSAGSGNTKYNEKFKGRVTITADTSTSTAYMELSSLRSEDTAVYYCAVSYYSYDVLDYWGQGTTVTVSS

SEQ ID NO: 1345 - skipped

SEQ ID NO: 1346 - protein, 119 aa, synthetic construct
QVQLVQSGAEVKKPGSSVKVSCKASGHDFRLTYIHWVRQAPGQGLEWMGRVSAGSGNVKYNEKFKGRVTITADTSTSTAYMELSSLRSEDTAVYYCAVSYYSYDVLDYWGQGTTVTVSS

SEQ ID NO: 1347 - protein, 107 aa, synthetic construct
DIQMTQSPSFLSASVGDRVTITCKASQNVGNRVVWHQQKPGKAPKALIYSSSHRYKGVPSRFSGSGSGTEFTLTISSLQPEDFATYFCQQFKSYPLTFGQGTKLEIK

SEQ ID NO: 1348 - protein, 119 aa, synthetic construct
QVQLVQSGAEVKKPGSSVKVSCKASGHDFRLTYIHWVRQAPGQGLEWMGRIYAGSGNVKYNEKFKGRVTITADTSTSTAYMELSSLRSEDTAVYYCAVSYYSYDVLDYWGQGTTVTVSS

SEQ ID NO: 1349 - protein, 107 aa, synthetic construct
DIQMTQSPSFLSASVGDRVTITCKASQNVADRVVWHQQKPGKAPKALIYSSSHRYKGVPSRFSGSGSGTEFTLTISSLQPEDFATYFCQQFKSYPLTFGQGTKLEIK

SEQ ID NO: 1350 - protein, 119 aa, synthetic construct
QVQLVQSGAEVKKPGSSVKVSCKASGHDFKLTYIHWVRQAPGQGLEWMGRVSAGSGNTKYNEKFKGRVTITADTSTSTAYMELSSLRSEDTAVYYCAVSYYSYDVLDYWGQGTTVTVSS

SEQ ID NO: 1351 - protein, 107 aa, synthetic construct; identical to SEQ ID NO: 160

SEQ ID NO: 1352 - skipped

SEQ ID NO: 1353 - protein, 107 aa, synthetic construct; identical to SEQ ID NO: 199

SEQ ID NO: 1354-1355 - skipped (2 entries)

SEQ ID NO: 1356 - protein, 119 aa, synthetic construct
QVQLVQSGAEVKKPGSSVKVSCKASGHDFRLTYIHWVRQAPGQGLEWMGRVYAGSGNTKYNEKFKGRVTITADTSTSTAYMELSSLRSEDTAVYYCAVSYYSYDVLDYWGQGTTVTVSS

SEQ ID NO: 1357 - protein, 107 aa, synthetic construct
DIQMTQSPSFLSASVGDRVTITCKASQNVEDRVVWHQQKPGKAPKALIYSSSHRYKGVPSRFSGSGSGTEFTLTISSLQPEDFATYFCQQFKSYPLTFGQGTKLEIK

SEQ ID NO: 1358-1359 - skipped (2 entries)

SEQ ID NO: 1360 - protein, 119 aa, synthetic construct
QVQLVQSGAEVKKPGSSVKVSCKASGHDFKLTYIHWVRQAPGQGLEWMGRISAGSGNTKYNEKFKGRVTITADTSTSTAYMELSSLRSEDTAVYYCAVSYYSYDVLDYWGQGTTVTVSS

SEQ ID NO: 1361 - protein, 107 aa, synthetic construct
DIQMTQSPSFLSASVGDRVTITCKASQNVGDRVVWHQQKPGKAPKALIYSSSHRYKGVPSRFSGSGSGTEFTLTISSLQPEDFATYFCQQFKSYPLTFGQGTKLEIK

SEQ ID NO: 1362 - protein, 119 aa, synthetic construct
QVQLVQSGAEVKKPGSSVKVSCKASGHDFKLTYIHWVRQAPGQGLEWMGRIYAGSGNTKYNEKFKGRVTITADTSTSTAYMELSSLRSEDTAVYYCAVSYYSYDVLDYWGQGTTVTVSS

SEQ ID NO: 1363-1364 - skipped (2 entries)

SEQ ID NO: 1365 - protein, 107 aa, synthetic construct
DIQMTQSPSFLSASVGDRVTITCRASQNVDNRLGWHQQKPGKAPKALIYSSSHRYKGVPSRFSGSGSGTEFTLTISSLQPEDFATYFCQQFKSYPLTFGQGTKLEIK

SEQ ID NO: 1366 - skipped

SEQ ID NO: 1367 - protein, 107 aa, synthetic construct
DIQMTQSPSFLSASVGDRVTITCKASQNVDNRVAWHQQKPGKAPKALIYAASSLQKGVPSRFSGSGSGTEFTLTISSLQPEDFATYFCQQFKSYPLTFGQGTKLEIK

SEQ ID NO: 1368 - skipped

SEQ ID NO: 1369 - protein, 107 aa, synthetic construct
DIQMTQSPSFLSASVGDRVTITCKASQNVDNRVAWHQQKPGKAPKALIYSSSHRYKGVPSRFSGSGSGTEFTLTISSLQPEDFATYFCLQHNSYPLTFGQGTKLEIK

SEQ ID NO: 1370 - protein, 119 aa, synthetic construct
QVQLVQSGAEVKKPGSSVKVSCKASGHDFKLTYIHWVRQAPGQGLEWMGRVSAGSGNVNYAQKFQGRVTITADTSTSTAYMELSSLRSEDTAVYYCAVSYYSYDVLDYWGQGTTVTVSS

SEQ ID NO: 1371-1375 - skipped (5 entries)

SEQ ID NO: 1376 - protein, 252 aa, synthetic construct
QVQLQQSGTELMKPGASVKISCKASGYTFSNYWIEWIKQRPGHGLEWVGEILPGAGPTNYNEKFKGKATFTADSSSNTAYMQLSSLTSEDSAVYYCARTDYDYDWFAYWGQGTLVTVSAGGGGSGGGGSGGGGSGGGGSDIVMSQSPSSLAVSVGEKVTMSCKSSQSLLYSGNQKNYLAWYQQKPGQSPKLLIYWASTRESGVPDRFTGSGSGTDFTLTINSVKAEDLTVYYCQQYYGYPRTFGGGTKVEIK

SEQ ID NO: 1377-2190 - skipped (814 entries)

SEQ ID NO: 2191 - protein, 133 aa, synthetic construct [sequence omitted]

SEQ ID NO: 2192-2269 - skipped (78 entries)

SEQ ID NO: 2270 - protein, 133 aa, synthetic construct
APTSSSTKKTQLQLEHLLLDLQMILNGINNYKNPKLTRMLTFKFYMPKKATELKHLQCLEEELKPLEEVLNLAQSKNFHLRPRDLISNINVIVLELKGSETTFMCEYADETATIVEFLNRWITFAQSIISTLT

SEQ ID NO: 2271-2279 - skipped (9 entries)

SEQ ID NO: 2280 - protein, 133 aa, synthetic construct
APASSSTKKTQLQLEHLLLDLQMILNGINNYKNPKLTRMLTAKFAMPKKATELKHLQCLEEELKPLEEVLNGAQSKNFHLRPRDLISNINVIVLELKGSETTFMCEYADETATIVEFLNRWITFAQSIISTLT

SEQ ID NO: 2281-2999 - skipped (719 entries)

SEQ ID NO: 3000 - protein, 107 aa, synthetic construct
DIQMTQSPSFLSASVGDRVTITCSASQGISNYLNWYQQKPGKAVKLLIYYTSSLHSGVPSRFSGSGSGTEYTLTISSLQPEDFATYYCQQYSKLPRTFGGGTKVEIK

SEQ ID NO: 3001 - protein, 107 aa, synthetic construct
DIQMTQSPSSLSASVGDRVTITCSASQGISNYLNWYQQKPGKAVKLLIYYTSSLHSGVPSRFSGSGSGTDYTLTISSLQPEDFATYYCQQYSKLPRTFGGGTKVEIK

SEQ ID NO: 3002 - protein, 107 aa, synthetic construct
DIQMTQSPSSLSASVGDRVTITCSASQGISNYLNWYQQKPGKVVKLLIYYTSSLHSGVPSRFSGSGSGTDYTLTISSLQPEDVATYYCQQYSKLPRTFGGGTKVEIK

SEQ ID NO: 3003 - protein, 107 aa, synthetic construct
DIQMTQSPSSLSASVGDRVTITCSASQGISNYLNWYQQKPGQAVKLLIYYTSSLHSGVPSRFSGSGSGTDYTLTISSLQPEDVATYYCQQYSKLPRTFGGGTKVEIK

SEQ ID NO: 3004 - protein, 107 aa, synthetic construct
DIQMTQSPSSLSASVGDRVTITCSASQGISNYLNWYQQKPGKAVKLLIYYTSSLHSGVPSRFSGSGSGTDYTFTISSLQPEDIATYYCQQYSKLPRTFGGGTKVEIK

SEQ ID NO: 3005 - protein, 107 aa, synthetic construct
DIQMTQSPSSLSASVGDRVTITCSASQGISNYLNWYQQKPGKTVKLLIYYTSSLHSGIPSRFSGSGSGTDYTLTIRSLQPEDFATYYCQQYSKLPRTFGGGTKVEIK

SEQ ID NO: 3006 - protein, 107 aa, synthetic construct
AIQMTQSPSSLSASVGDRVTITCSASQGISNYLNWYQQKPGKAVKLLIYYTSSLHSGVPSRFSGSGSGTDYTLTISSLQPEDFATYYCQQYSKLPRTFGGGTKVEIK

SEQ ID NO: 3007 - protein, 107 aa, synthetic construct
DIQMTQSPSSVSASVGDRVTITCSASQGISNYLNWYQQKPGKAVKLLIYYTSSLHSGVPSRFSGSGSGTDYTLTISSLQPEDFATYYCQQYSKLPRTFGGGTKVEIK

SEQ ID NO: 3008 - protein, 107 aa, synthetic construct
DIQMTQSPSSLSASVGDRVTITCSASQGISNYLNWYQQKPGKAVKRLIYYTSSLHSGVPSRFSGSGSGTEYTLTISNLQPEDFATYYCQQYSKLPRTFGGGTKVEIK

SEQ ID NO: 3009 - protein, 107 aa, synthetic construct
AIRMTQSPFSLSASVGDRVTITCSASQGISNYLNWYQQKPAKAVKLFIYYTSSLHSGVPSRFSGSGSGTDYTLTISSLQPEDFATYYCQQYSKLPRTFGGGTKVEIK

SEQ ID NO: 3010 - protein, 107 aa, synthetic construct
DIQMTQSPSSLSASVGDRVTITCSASQGISNYLNWYQQKPGKAVKRLIYYTSSLHSGVPSRFSGSGSGTEYTLTISSLQPEDFATYYCQQYSKLPRTFGGGTKVEIK

SEQ ID NO: 3011 - protein, 107 aa, synthetic construct
DIQMTQSPSTLSASVGDRVTITCSASQGISNYLNWYQQKPGKAVKLLIYYTSSLHSGVPSRFSGSGSGTEYTLTISSLQPDDFATYYCQQYSKLPRTFGGGTKVEIK

SEQ ID NO: 3012 - protein, 107 aa, synthetic construct
DIQMTQSPSSLSASVGDRVTITCSASQGISNYLNWYQQKPGKAVKSLIYYTSSLHSGVPSRFSGSGSGTDYTLTISSLQPEDFATYYCQQYSKLPRTFGGGTKVEIK

SEQ ID NO: 3013 - protein, 107 aa, synthetic construct
DIQMTQSPSSLSASVGDRVTITCSASQGISNYLNWYQQKPGKAVKSLIYYTSSLHSGVPSKFSGSGSGTDYTLTISSLQPEDFATYYCQQYSKLPRTFGGGTKVEIK

SEQ ID NO: 3014 - protein, 107 aa, synthetic construct
DIQMTQSPSSLSASVGDRVTITCSASQGISNYLNWYQQKPEKAVKSLIYYTSSLHSGVPSRFSGSGSGTDYTLTISSLQPEDFATYYCQQYSKLPRTFGGGTKVEIK

SEQ ID NO: 3015 - protein, 107 aa, synthetic construct
DIQMTQSPSAMSASVGDRVTITCSASQGISNYLNWYQQKPGKVVKRLIYYTSSLHSGVPSRFSGSGSGTEYTLTISSLQPEDFATYYCQQYSKLPRTFGGGTKVEIK

SEQ ID NO: 3016 - protein, 107 aa, synthetic construct
DIVMTQSPDSLAVSLGERATINCSASQGISNYLNWYQQKPGQPVKLLIYYTSSLHSGVPDRFSGSGSGTDYTLTISSLQAEDVAVYYCQQYSKLPRTFGGGTKVEIK

SEQ ID NO: 3017 - protein, 107 aa, synthetic construct
EIVMTQSPGTLSLSPGERATLSCSASQGISNYLNWYQQKPGQAVKLLIYYTSSLHSGIPDRFSGSGSGTDYTLTISRLEPEDFAVYYCQQYSKLPRTFGGGTKVEIK

SEQ ID NO: 3018 - protein, 107 aa, synthetic construct
EIVMTQSPPTLSLSPGERVTLSCSASQGISNYLNWYQQKPGQAVKLLIYYTSSLHSGIPARFSGSGSGTDYTLTISSLQPEDFAVYYCQQYSKLPRTFGGGTKVEIK

SEQ ID NO: 3019 - protein, 107 aa, synthetic construct
EIVMTQSPPTLSLSPGERVTLSCSASQGISNYLNWYQQKPGQAVKLLIYYTSSLHSSIPARFSGSGSGTDYTLTISSLQPEDFAVYYCQQYSKLPRTFGGGTKVEIK

SEQ ID NO: 3020 - protein, 107 aa, synthetic construct
EIVMTQSPATLSLSPGERATLSCSASQGISNYLNWYQQKPGQAVKLLIYYTSSLHSGIPARFSGSGSGTDYTLTISSLEPEDFAVYYCQQYSKLPRTFGGGTKVEIK

SEQ ID NO: 3021 - protein, 107 aa, synthetic construct
EIVMTQSPATLSLSPGERATLSCSASQGISNYLNWYQQKPGQAVKLLIYYTSSLHSGIPARFSGSGSGTDYTLTISRLEPEDFAVYYCQQYSKLPRTFGGGTKVEIK

SEQ ID NO: 3022 - protein, 107 aa, synthetic construct
EIVMTQSPATLSLSPGERATLSCSASQGISNYLNWYQQKPGQAVKLLIYYTSSLHSGIPDRFSGSGSGTDYTLTISRLEPEDFAVYYCQQYSKLPRTFGGGTKVEIK

SEQ ID NO: 3023 - protein, 107 aa, synthetic construct
EIVMTQSPATLSLSPGERATLSCSASQGISNYLNWYQQKPGLAVKLLIYYTSSLHSGIPDRFSGSGSGTDYTLTISRLEPEDFAVYYCQQYSKLPRTFGGGTKVEIK

SEQ ID NO: 3024 - protein, 107 aa, synthetic construct
DIQMIQSPSFLSASVGDRVSIICSASQGISNYLNWYLQKPGKSVKLFIYYTSSLHSGVSSRFSGRGSGTDYTLTIISLKPEDFAAYYCQQYSKLPRTFGGGTKVEIK

SEQ ID NO: 3025 - protein, 107 aa, synthetic construct
EIVMTQSPATLSLSPGERATLSCSASQGISNYLNWYQQKPGQAVKLLIYYTSSLHSGIPARFSGSGSGTDYTLTISSLQPEDFAVYYCQQYSKLPRTFGGGTKVEIK

SEQ ID NO: 3026 - protein, 107 aa, synthetic construct
EIVMTQSPATLSLSPGERATLSCSASQGISNYLNWYQQKPGQAVKLLIYYTSSLHSGIPARFSGSGPGTDYTLTISSLEPEDFAVYYCQQYSKLPRTFGGGTKVEIK

SEQ ID NO: 3027 - protein, 107 aa, synthetic construct
DIVMTQTPLSLSVTPGQPASISCSASQGISNYLNWYLQKPGQSVKLLIYYTSSLHSGVPDRFSGSGSGTDYTLKISRVEAEDVGVYYCQQYSKLPRTFGGGTKVEIK

SEQ ID NO: 3028 - protein, 107 aa, synthetic construct
DIVMTQTPLSLSVTPGQPASISCSASQGISNYLNWYLQKPGQPVKLLIYYTSSLHSGVPDRFSGSGSGTDYTLKISRVEAEDVGVYYCQQYSKLPRTFGGGTKVEIK

SEQ ID NO: 3029 - protein, 107 aa, synthetic construct
DIVMTQSPAFLSVTPGEKVTITCSASQGISNYLNWYQQKPDQAVKLLIYYTSSLHSGVPSRFSGSGSGTDYTFTISSLEAEDAATYYCQQYSKLPRTFGGGTKVEIK

SEQ ID NO: 3030 - protein, 107 aa, synthetic construct
DIVMTQSPLSLPVTPGEPASISCSASQGISNYLNWYLQKPGQSVKLLIYYTSSLHSGVPDRFSGSGSGTDYTLKISRVEAEDVGVYYCQQYSKLPRTFGGGTKVEIK

SEQ ID NO: 3031 - protein, 107 aa, synthetic construct
DIVMTQTPLSLPVTPGEPASISCSASQGISNYLNWYLQKPGQSVKLLIYYTSSLHSGVPDRFSGSGSGTDYTLKISRVEAEDVGVYYCQQYSKLPRTFGGGTKVEIK

SEQ ID NO: 3032 - protein, 107 aa, synthetic construct
EIVMTQSPATLSVSPGERATLSCSASQGISNYLNWYQQKPGQAVKLLIYYTSSLHSGIPARFSGSGSGTEYTLTISILQSEDFAVYYCQQYSKLPRTFGGGTKVEIK

SEQ ID NO: 3033 - protein, 107 aa, synthetic construct
EIVMTQSPATLSVSPGERATLSCSASQGISNYLNWYQQKPGQAVKLLIYYTSSLHSGIPARFSGSGSGTEYTLTISSLQSEDFAVYYCQQYSKLPRTFGGGTKVEIK

SEQ ID NO: 3034 - protein, 107 aa, synthetic construct
DIVMTQSPLSLPVTLGQPASISCSASQGISNYLNWYQQRPGQSVKRLIYYTSSLHSGVPDRFSGSGSGTDYTLKISRVEAEDVGVYYCQQYSKLPRTFGGGTKVEIK

SEQ ID NO: 3035 - protein, 107 aa, synthetic construct
EITMTQSPAFMSATPGDKVNISCSASQGISNYLNWYQQKPGEAVKFIIYYTSSLHSGIPPRFSGSGYGTDYTLTINNIESEDAAYYYCQQYSKLPRTFGGGTKVEIK

SEQ ID NO: 3036 - protein, 107 aa, synthetic construct
DIVMTQTPLSSPVTLGQPASISCSASQGISNYLNWYQQRPGQPVKLLIYYTSSLHSGVPDRFSGSGAGTDYTLKISRVEAEDVGVYYCQQYSKLPRTFGGGTKVEIK

SEQ ID NO: 3037 - protein, 107 aa, synthetic construct
EIVMTQSPDFQSVTPKEKVTITCSASQGISNYLNWYQQKPDQSVKLLIYYTSSLHSGVPSRFSGSGSGTDYTLTINSLEAEDAATYYCQQYSKLPRTFGGGTKVEIK

SEQ ID NO: 3038 - protein, 107 aa, synthetic construct
EIVMTQTPLSLSITPGEQASISCSASQGISNYLNWYLQKARPVVKLLIYYTSSLHSGVPDRFSGSGSGTDYTLKISRVEAEDFGVYYCQQYSKLPRTFGGGTKVEIK

SEQ ID NO: 3039 - protein, 107 aa, synthetic construct
EIVMTQTPLSLSITPGEQASMSCSASQGISNYLNWYLQKARPVVKLLIYYTSSLHSGVPDRFSGSGSGTDYTLKISRVEAEDFGVYYCQQYSKLPRTFGGGTKVEIK

SEQ ID NO: 3040 - protein, 120 aa, synthetic construct
QVTLKESGPVLVKPTETLTLTCTVSGFSLTAYGVNWVRQPPGKALEWLGMIWGDGNTDYNSALKSRLTISKDNSKSQVVLTMTNMDPVDTATYYCARDRVTATLYAMDYWGQGTLVTVSS

SEQ ID NO: 3041 - protein, 120 aa, synthetic construct
QVTLKESGPALVKPTETLTLTCTVSGFSLTAYGVNWVRQPPGKALEWLGMIWGDGNTDYNSALKSRLIISKDNSKSQVVLTMTNMDPVDTATYYCARDRVTATLYAMDYWGQGTLVTVSS

SEQ ID NO: 3042 - protein, 120 aa, synthetic construct
QVTLKESGPALVKPTQTLTLTCTVSGFSLTAYGVNWVRQPPGKALEWLGMIWGDGNTDYNSALKSRLTISKDNSKSQVVLTMTNMDPVDTATYYCARDRVTATLYAMDYWGQGTLVTVSS

SEQ ID NO: 3043 - protein, 120 aa, synthetic construct
QVQLQESGPGLVKPSGTLSLTCAVSGFSLTAYGVNWVRQPPGKGLEWLGMIWGDGNTDYNSALKSRLTISKDNSKSQVSLKLSSVTAADTAVYYCARDRVTATLYAMDYWGQGTLVTVSS

SEQ ID NO: 3044 - protein, 120 aa, synthetic construct
QVTLKESGPTLVKPTQTLTLTCTVSGFSLTAYGVNWVRQPPGKALEWLGMIWGDGNTDYNSALKSRLTITKDNSKSQVVLTMTNMDPVDTATYYCARDRVTATLYAMDYWGQGTLVTVSS

SEQ ID NO: 3045 - protein, 120 aa, synthetic construct
QVTLKESGPALVKPTQTLTLTCTVSGFSLTAYGVNWVRQPPGKALEWLGMIWGDGNTDYNSALKSRLTITKDNSKSQVVLTMTNMDPVDTATYYCARDRVTATLYAMDYWGQGTLVTVSS

SEQ ID NO: 3046 - protein, 120 aa, synthetic construct
QVQLQESGPGLVKPSQTLSLTCTVSGFSLTAYGVNWVRQPPGKGLEWLGMIWGDGNTDYNSALKSRLTISKDNSKSQVSLKLSSVTAADTAVYYCARDRVTATLYAMDYWGQGTLVTVSS

SEQ ID NO: 3047 - protein, 120 aa, synthetic construct
QVQLQESGPGLVKPSETLSLTCTVSGFSLTAYGVNWVRQPPGKGLEWLGMIWGDGNTDYNSALKSRLTISKDNSKSQVSLKLSSVTAADTAVYYCARDRVTATLYAMDYWGQGTLVTVSS

SEQ ID NO: 3048 - protein, 120 aa, synthetic construct
QVQLQESGPGLVKPSQTLSLTCAVSGFSLTAYGVNWVRQPPGKGLEWLGMIWGDGNTDYNSALKSRLTISKDNSKSQVSLKLSSVTAADTAVYYCARDRVTATLYAMDYWGQGTLVTVSS

SEQ ID NO: 3049 - protein, 120 aa, synthetic construct
QVQLQESGPGLVKPSDTLSLTCTVSGFSLTAYGVNWVRQPPGKGLEWLGMIWGDGNTDYNSALKSRLTISKDNSKSQVSLKLSSVTAADTAVYYCARDRVTATLYAMDYWGQGTLVTVSS

SEQ ID NO: 3050 - protein, 120 aa, synthetic construct
QVQLQESGPGLVKPSQTLSLTCTVSGFSLTAYGVNWVRQHPGKGLEWLGMIWGDGNTDYNSALKSRLTISKDNSKSQVSLKLSSVTAADTAVYYCARDRVTATLYAMDYWGQGTLVTVSS

SEQ ID NO: 3051 - protein, 120 aa, synthetic construct
QVQLQESGPGLVKPSQTLSLTCTVSGFSLTAYGVNWVRQPAGKGLEWLGMIWGDGNTDYNSALKSRLTISKDNSKSQVSLKLSSVTAADTAVYYCARDRVTATLYAMDYWGQGTLVTVSS

SEQ ID NO: 3052 - protein, 120 aa, synthetic construct
QVQLQESGPGLVKPSQTLSLTCAVSGFSLTAYGVNWVRQPPGKGLEWLGMIWGDGNTDYNSALKSRLTISKDNSKSQVSLKLSSVTAVDTAVYYCARDRVTATLYAMDYWGQGTLVTVSS

SEQ ID NO: 3053 - protein, 120 aa, synthetic construct
QVQLQESGPGLVKPSETLSLTCTVSGFSLTAYGVNWVRQPPGKGLEWLGMIWGDGNTDYNSALKSRLTISKDNSKSHVSLKLSSVTAADTAVYYCARDRVTATLYAMDYWGQGTLVTVSS

SEQ ID NO: 3054 - protein, 120 aa, synthetic construct
QVQLQESGPGLVKPSETLSLTCAVSGFSLTAYGVNWVRQPPGKGLEWLGMIWGDGNTDYNSALKSRLTISKDNSKSQVSLKLSSVTAADTAVYYCARDRVTATLYAMDYWGQGTLVTVSS

SEQ ID NO: 3055 - protein, 120 aa, synthetic construct
QVQLQESGPGLVKPSQTLSLTCAVYGFSLTAYGVNWVRQPPGKGLEWLGMIWGDGNTDYNSALKSRLTISKDNSKSQVSLKLSSVTAADTAVYYCARDRVTATLYAMDYWGQGTLVTVSS

SEQ ID NO: 3056 - protein, 120 aa, synthetic construct
RVQLQESGPGLVKPSETLSLTCTVSGFSLTAYGVNWVRQPPGKGLEWLGMIWGDGNTDYNSALKSRLTISKDNSKSQVPLKLSSVTAADTAVYYCARDRVTATLYAMDYWGQGTLVTVSS

SEQ ID NO: 3057 - protein, 120 aa, synthetic construct
QVQLQESGPGLVKPSQTLSLTCTVSGFSLTAYGVNWVRQHPGKGLEWLGMIWGDGNTDYNSALKSLLTISKDNSKSQVSLKLSSVTAADTAVYYCARDRVTATLYAMDYWGQGTLVTVSS

SEQ ID NO: 3058 - protein, 120 aa, synthetic construct
QVQLQESGPGLVKPSDTLSLTCAVSGFSLTAYGVNWVRQPPGKGLEWLGMIWGDGNTDYNSALKSRLTISKDNSKSQVSLKLSSVTALDTAVYYCARDRVTATLYAMDYWGQGTLVTVSS

SEQ ID NO: 3059 - protein, 120 aa, synthetic construct
QVQLQESGPGLVKPSDTLSLTCAVSGFSLTAYGVNWVRQPPGKGLEWLGMIWGDGNTDYNSALKSRLTISKDNSKSQVSLKLSSVTAVDTAVYYCARDRVTATLYAMDYWGQGTLVTVSS

SEQ ID NO: 3060 - protein, 120 aa, synthetic construct
QVQLQESGSGLVKPSQTLSLTCAVSGFSLTAYGVNWVRQPPGKGLEWLGMIWGDGNTDYNSALKSRLTISKDNSKSQVSLKLSSVTAADTAVYYCARDRVTATLYAMDYWGQGTLVTVSS

SEQ ID NO: 3061 - protein, 120 aa, synthetic construct
EVQLVESGGGLVQPGRSLRLSCTVSGFSLTAYGVNWVRQAPGKGLEWLGMIWGDGNTDYNSALKSRLTISKDNSKSIVYLQMNSLKTEDTAVYYCARDRVTATLYAMDYWGQGTLVTVSS

SEQ ID NO: 3062 - protein, 120 aa, synthetic construct
EVQLVESGGGLVQPGPSLRLSCTVSGFSLTAYGVNWVRQAPGKGLEWLGMIWGDGNTDYNSALKSRLTISKDNSKSIVYLQMNSLKTEDTAVYYCARDRVTATLYAMDYWGQGTLVTVSS

SEQ ID NO: 3063 - protein, 120 aa, synthetic construct
QVQLQESGSGLVKPSQTLSLTCAVSGFSLTAYGVNWVRQSPGKGLEWLGMIWGDGNTDYNSALKSRLTISKDNSKSQVSLKLSSVTAADTAVYYCARDRVTATLYAMDYWGQGTLVTVSS

SEQ ID NO: 3064 - protein, 120 aa, synthetic construct
QVQLQESGPGLVKPSETLSLTCTVSGFSLTAYGVNWVRQPAGKGLEWLGMIWGDGNTDYNSALKSRLTISKDNSKSQVSLKLSSVTAADTAVYYCARDRVTATLYAMDYWGQGTLVTVSS

SEQ ID NO: 3065 - protein, 120 aa, synthetic construct
EVQLVESGGGLVKPGRSLRLSCTVSGFSLTAYGVNWVRQAPGKGLEWLGMIWGDGNTDYNSALKSRLTISKDNSKSIVYLQMNSLKTEDTAVYYCARDRVTATLYAMDYWGQGTLVTVSS

SEQ ID NO: 3066 - protein, 120 aa, synthetic construct
QVQLQESGPGLVKPSETLSLTCAVYGFSLTAYGVNWVRQPPGKGLEWLGMIWGDGNTDYNSALKSRLTISKDNSKSQVYLKLSSVTAADTAVYYCARDRVTATLYAMDYWGQGTLVTVSS

SEQ ID NO: 3067 - protein, 120 aa, synthetic construct
QVQLQESGPGLVKPSDTLSLTCAVSGFSLTAYGVNWVRQPPGKGLEWLGMIWGDGNTDYNSALKSRLTISKDNSKSQVSLKLSSVTAVDTGVYYCARDRVTATLYAMDYWGQGTLVTVSS

SEQ ID NO: 3068 - protein, 120 aa, synthetic construct
EVQLVESGGGLVQPGGSLRLSCAVSGFSLTAYGVNWVRQAPGKGLEWLGMIWGDGNTDYNSALKSRLTISKDNSKSSVYLQMNSLKTEDTAVYYCARDRVTATLYAMDYWGQGTLVTVSS

SEQ ID NO: 3069 - protein, 120 aa, synthetic construct
EVQLVESGGGLVKPGGSLRLSCAVSGFSLTAYGVNWVRQAPGKGLEWLGMIWGDGNTDYNSALKSRLTISKDNSKSTVYLQMNSLKTEDTAVYYCARDRVTATLYAMDYWGQGTLVTVSS

SEQ ID NO: 3070 - protein, 120 aa, synthetic construct
QVQLQQSGPGLVKPSQTLSLTCAVSGFSLTAYGVNWVRQSPSRGLEWLGMIWGDGNTDYNSALKSRLTINKDNSKSQVSLQLNSVTPEDTAVYYCARDRVTATLYAMDYWGQGTLVTVSS

SEQ ID NO: 3071 - protein, 120 aa, synthetic construct
QVQLVESGGGLVQPGGSLRLSCSVSGFSLTAYGVNWVRQAPGKGLEWLGMIWGDGNTDYNSALKSRLTISKDNSKSTVYLQMNSLRAEDTAVYYCARDRVTATLYAMDYWGQGTLVTVSS

SEQ ID NO: 3072 - protein, 120 aa, synthetic construct
QVQLQQWGAGLLKPSETLSLTCAVYGFSLTAYGVNWVRQPPGKGLEWLGMIWGDGNTDYNSALKSRLTISKDNSKSQVSLKLSSVTAADTAVYYCARDRVTATLYAMDYWGQGTLVTVSS

SEQ ID NO: 3073 - protein, 120 aa, synthetic construct
QVQLVESGGGVVQPGRSLRLSCAVSGFSLTAYGVNWVRQAPGKGLEWLGMIWGDGNTDYNSALKSRLTISKDNSTSTVFLQMNSLRAEDTAVYYCARDRVTATLYAMDYWGQGTLVTVSS

SEQ ID NO: 3074 - protein, 120 aa, synthetic construct
EVQLVESGGGLVQPGGSLRLSCAVSGFSLTAYGVNWVRQAPGKGLEWLGMIWGDGNTDYNSALKSRLTISKDNSKSTVYLQMNSLRAEDTAVYYCARDRVTATLYAMDYWGQGTLVTVSS

SEQ ID NO: 3075 - protein, 120 aa, synthetic construct
EVQLVESGGGLVQPGGSLRLSCAVSGFSLTAYGVNWVRQAPGKGLEWLGMIWGDGNTDYNSALKSRLTISKDNAKSSVYLQMNSLRDEDTAVYYCARDRVTATLYAMDYWGQGTLVTVSS

SEQ ID NO: 3076 - protein, 120 aa, synthetic construct
EVQLLESGGGLVQPGGSLRLSCAVSGFSLTAYGVNWVRQAPGKGLEWLGMIWGDGNTDYNSALKSRLTISKDNSKSTVYLQMNSLRAEDTAVYYCARDRVTATLYAMDYWGQGTLVTVSS

SEQ ID NO: 3077 - protein, 120 aa, synthetic construct
QVQLVESGGGLVKPGGSLRLSCAVSGFSLTAYGVNWVRQAPGKGLEWLGMIWGDGNTDYNSALKSRLTISKDNAKSSVYLQMNSLRAEDTAVYYCARDRVTATLYAMDYWGQGTLVTVSS

SEQ ID NO: 3078 - protein, 120 aa, synthetic construct
EVQLVESGGGLVQPGGSLKLSCAVSGFSLTAYGVNWVRQASGKGLEWLGMIWGDGNTDYNSALKSRLTISKDNSKSTVYLQMNSLKTEDTAVYYCARDRVTATLYAMDYWGQGTLVTVSS

SEQ ID NO: 3079 - protein, 120 aa, synthetic construct
QVQLLESGGGLVKPGGSLRLSCAVSGFSLTAYGVNWVRQAPGKGLEWLGMIWGDGNTDYNSALKSRLTISKDNAKSSVYLQMNSLRAEDTAVYYCARDRVTATLYAMDYWGQGTLVTVSS

SEQ ID NO: 3080 - protein, 120 aa, synthetic construct
QVQLVESGGGVVQPGRSLRLSCAVSGFSLTAYGVNWVRQAPGKGLEWLGMIWGDGNTDYNSALKSRLTISKDNSKSTVYLQMNSLRAEDTAVYYCARDRVTATLYAMDYWGQGTLVTVSS

SEQ ID NO: 3081 - protein, 120 aa, synthetic construct
QVQLVESGGGVVQPGRSLRLSCAVSGFSLTAYGVNWVRQAPGKGLEWLGMIWGDGNTDYNSALKSRLTISKDNSKSRVYLQMNSLRAEDTAVYYCARDRVTATLYAMDYWGQGTLVTVSS

SEQ ID NO: 3082 - protein, 120 aa, synthetic construct
QVQLVESGGGVVQPGRSLRLSCAVSGFSLTAYGVNWVRQAPGKGLEWLGMIWGDGNTDYNSALKSRLAISKDNSKSTVYLQMNSLRAEDTAVYYCARDRVTATLYAMDYWGQGTLVTVSS

SEQ ID NO: 3083 - protein, 120 aa, synthetic construct
QVQLVESGGGVVQPGGSLRLSCAVSGFSLTAYGVNWVRQAPGKGLEWLGMIWGDGNTDYNSALKSRLTISKDNSKSTVYLQMNSLRAEDTAVYYCARDRVTATLYAMDYWGQGTLVTVSS

SEQ ID NO: 3084 - protein, 120 aa, synthetic construct
EVQLVESGGGLVQPGGSLRLSCAVSGFSLTAYGVNWVRQAPGKGLEWLGMIWGDGNTDYNSALKSRLTISKDNAKSTVYLQMNSLRAEDTAVYYCARDRVTATLYAMDYWGQGTLVTVSS

SEQ ID NO: 3085 - protein, 120 aa, synthetic construct
EVQLVESGGGLVQPGGSLRLSCAVSGFSLTAYGVNWVRQAPGKGLEWLGMIWGDGNTDYNSALKSRLTISKDNAKSSVYLQMNSLRAEDTAVYYCARDRVTATLYAMDYWGQGTLVTVSS

SEQ ID NO: 3086 - protein, 120 aa, synthetic construct
EVQLVESGGVVVQPGGSLRLSCAVSGFSLTAYGVNWVRQAPGKGLEWLGMIWGDGNTDYNSALKSRLTISKDNSKSSVYLQMNSLRTEDTALYYCARDRVTATLYAMDYWGQGTLVTVSS

SEQ ID NO: 3087 - protein, 120 aa, synthetic construct
EVQLVESGGGLVQPGGSLRLSCAVSGFSLTAYGVNWVRQAPGKGLEWLGMIWGDGNTDYNSALKSRLTISKHNSKSTVYLQMNSLRAEDTAVYYCARDRVTATLYAMDYWGQGTLVTVSS

SEQ ID NO: 3088 - protein, 120 aa, synthetic construct
EVQLVESGGGLVKPGGSLRLSCAVSGFSLTAYGVNWVRQAPGKGLEWLGMIWGDGNTDYNSALKSRLTISKDNAKSSVYLQMNSLRAEDTAVYYCARDRVTATLYAMDYWGQGTLVTVSS

SEQ ID NO: 3089 - protein, 120 aa, synthetic construct
EVQLVESGGGLIQPGGSLRLSCAVSGFSLTAYGVNWVRQPPGKGLEWLGMIWGDGNTDYNSALKSRLTISKDNSKSTVYLQMNSLRAEDTAVYYCARDRVTATLYAMDYWGQGTLVTVSS

SEQ ID NO: 3090 - skipped

SEQ ID NO: 3091 - protein, 119 aa, synthetic construct
QVQLQQSGPELVKPGASVKISCKASGYAFSSSWMNWVKQRPGQGLEWIGRIYPGDGDTKYNGKFKGKATLTADKSSSTAYMHLSSLTSVDSAVYFCARRGTGGWYFDVWGAGTTVTVSS

SEQ ID NO: 3092 - protein, 111 aa, synthetic construct
DIVLTQSPASLAVSLGQRATISCRASESVDSSGNSFMHWYQQKPGQPPQLLIYRASNLESGIPARFSGSGSRTDFTLTINPVEADDVATFYCQQSFDDPFTFGSGTKLEIK

SEQ ID NO: 3093 - protein, 111 aa, synthetic construct
DIVLTQSPDSLAVSLGERATINCRASESVDSSGNSFMHWYQQKPGQPPQLLIYRASNLESGVPDRFSGSGSRTDFTLTISSLQAEDVAVYYCQQSFDDPFTFGQGTKLEIK

SEQ ID NO: 3094 - protein, 111 aa, synthetic construct
EIVLTQSPATLSLSPGERATLSCRASESVDSSGNSFMHWYQQKPGQAPQLLIYRASNLESGIPARFSGSGSRTDFTLTISSLEPEDFAVYYCQQSFDDPFTFGQGTKLEIK

SEQ ID NO: 3095 - protein, 111 aa, synthetic construct
EIVLTQSPATLSLSPGERATLSCRASESVDSSGNSFMHWYQQKPGQAPQLLIYRASNLESGIPARFSGSGSRTDFTLTISRLEPEDFAVYYCQQSFDDPFTFGQGTKLEIK

SEQ ID NO: 3096 - protein, 111 aa, synthetic construct
EIVLTQSPATLSLSPGERATLSCRASESVDSSGNSFMHWYQQKPGQAPQLLIYRASNLESGIPARFSGSGSRTDFTLTISSLQPEDFAVYYCQQSFDDPFTFGQGTKLEIK

SEQ ID NO: 3097 - protein, 111 aa, synthetic construct
DIQLTQSPSSLSASVGDRVTITCRASESVDSSGNSFMHWYQQKPGQAPQLLIYRASNLESGVPSRFSGSGSRTDFTLTISSLQPEDVATYYCQQSFDDPFTFGQGTKLEIK

SEQ ID NO: 3098 - protein, 111 aa, synthetic construct
EIVLTQSPATLSLSPGERATLSCRASESVDSSGNSFMHWYQQKPGQAPQLLIYRASNLESGIPARFSGSGPRTDFTLTISSLEPEDFAVYYCQQSFDDPFTFGQGTKLEIK

SEQ ID NO: 3099 - protein, 111 aa, synthetic construct
EIVLTQSPATLSLSPGERATLSCRASESVDSSGNSFMHWYQQKPGQAPQLLIYRASNLESGIPDRFSGSGSRTDFTLTISRLEPEDFAVYYCQQSFDDPFTFGQGTKLEIK

SEQ ID NO: 3100 - protein, 111 aa, synthetic construct
DIQLTQSPSSLSASVGDRVTITCRASESVDSSGNSFMHWYQQKPGKVPQLLIYRASNLESGVPSRFSGSGSRTDFTLTISSLQPEDVATYYCQQSFDDPFTFGQGTKLEIK

SEQ ID NO: 3101 - protein, 111 aa, synthetic construct
DIQLTQSPSSLSASVGDRVTITCRASESVDSSGNSFMHWYQQKPGKTPQLLIYRASNLESGIPSRFSGSGSRTDFTLTIRSLQPEDFATYYCQQSFDDPFTFGQGTKLEIK

SEQ ID NO: 3102 - protein, 111 aa, synthetic construct
EIVLTQSPGTLSLSPGERATLSCRASESVDSSGNSFMHWYQQKPGQAPQLLIYRASNLESGIPDRFSGSGSRTDFTLTISRLEPEDFAVYYCQQSFDDPFTFGQGTKLEIK

SEQ ID NO: 3103 - protein, 111 aa, synthetic construct
EIVLTQSPATLSLSPGERATLSCRASESVDSSGNSFMHWYQQKPGLAPQLLIYRASNLESGIPDRFSGSGSRTDFTLTISRLEPEDFAVYYCQQSFDDPFTFGQGTKLEIK

SEQ ID NO: 3104 - protein, 111 aa, synthetic construct
DIQLTQSPSSLSASVGDRVTITCRASESVDSSGNSFMHWYQQKPGKAPQLLIYRASNLESGVPSRFSGSGSRTDFTLTISSLQPEDFATYYCQQSFDDPFTFGQGTKLEIK

SEQ ID NO: 3105 - protein, 111 aa, synthetic construct
DIQLTQSPSSVSASVGDRVTITCRASESVDSSGNSFMHWYQQKPGKAPQLLIYRASNLESGVPSRFSGSGSRTDFTLTISSLQPEDFATYYCQQSFDDPFTFGQGTKLEIK

SEQ ID NO: 3106 - protein, 111 aa, synthetic construct
AIQLTQSPSSLSASVGDRVTITCRASESVDSSGNSFMHWYQQKPGKAPQLLIYRASNLESGVPSRFSGSGSRTDFTLTISSLQPEDFATYYCQQSFDDPFTFGQGTKLEIK

SEQ ID NO: 3107 - protein, 111 aa, synthetic construct
DIQLTQSPSFLSASVGDRVTITCRASESVDSSGNSFMHWYQQKPGKAPQLLIYRASNLESGVPSRFSGSGSRTEFTLTISSLQPEDFATYYCQQSFDDPFTFGQGTKLEIK

SEQ ID NO: 3108 - protein, 111 aa, synthetic construct
DIQLTQSPSSLSASVGDRVTITCRASESVDSSGNSFMHWYQQKPGKAPQLLIYRASNLESGVPSRFSGSGSRTDFTFTISSLQPEDIATYYCQQSFDDPFTFGQGTKLEIK

SEQ ID NO: 3109 - protein, 111 aa, synthetic construct
EIVLTQSPATLSVSPGERATLSCRASESVDSSGNSFMHWYQQKPGQAPQLLIYRASNLESGIPARFSGSGSRTEFTLTISILQSEDFAVYYCQQSFDDPFTFGQGTKLEIK

SEQ ID NO: 3110 - protein, 111 aa, synthetic construct
EIVLTQSPATLSVSPGERATLSCRASESVDSSGNSFMHWYQQKPGQAPQLLIYRASNLESGIPARFSGSGSRTEFTLTISSLQSEDFAVYYCQQSFDDPFTFGQGTKLEIK

SEQ ID NO: 3111 - protein, 111 aa, synthetic construct
AIRLTQSPFSLSASVGDRVTITCRASESVDSSGNSFMHWYQQKPAKAPQLFIYRASNLESGVPSRFSGSGSRTDFTLTISSLQPEDFATYYCQQSFDDPFTFGQGTKLEIK

SEQ ID NO: 3112 - protein, 111 aa, synthetic construct
DIQLTQSPSSLSASVGDRVTITCRASESVDSSGNSFMHWYQQKPGKAPQSLIYRASNLESGVPSRFSGSGSRTDFTLTISSLQPEDFATYYCQQSFDDPFTFGQGTKLEIK

SEQ ID NO: 3113 - protein, 111 aa, synthetic construct
DIQLTQSPSSLSASVGDRVTITCRASESVDSSGNSFMHWYQQKPGKAPQRLIYRASNLESGVPSRFSGSGSRTEFTLTISNLQPEDFATYYCQQSFDDPFTFGQGTKLEIK

SEQ ID NO: 3114 - protein, 111 aa, synthetic construct
DIQLTQSPSTLSASVGDRVTITCRASESVDSSGNSFMHWYQQKPGKAPQLLIYRASNLESGVPSRFSGSGSRTEFTLTISSLQPDDFATYYCQQSFDDPFTFGQGTKLEIK

SEQ ID NO: 3115 - protein, 111 aa, synthetic construct
EIVLTQSPDFQSVTPKEKVTITCRASESVDSSGNSFMHWYQQKPDQSPQLLIYRASNLESGVPSRFSGSGSRTDFTLTINSLEAEDAATYYCQQSFDDPFTFGQGTKLEIK

SEQ ID NO: 3116 - protein, 111 aa, synthetic construct
DIQLTQSPSSLSASVGDRVTITCRASESVDSSGNSFMHWYQQKPGKAPQSLIYRASNLESGVPSKFSGSGSRTDFTLTISSLQPEDFATYYCQQSFDDPFTFGQGTKLEIK

SEQ ID NO: 3117 - protein, 111 aa, synthetic construct
DIQLTQSPSSLSASVGDRVTITCRASESVDSSGNSFMHWYQQKPGKAPQRLIYRASNLESGVPSRFSGSGSRTEFTLTISSLQPEDFATYYCQQSFDDPFTFGQGTKLEIK

SEQ ID NO: 3118 - protein, 111 aa, synthetic construct
DIVLTQTPLSLSVTPGQPASISCRASESVDSSGNSFMHWYLQKPGQPPQLLIYRASNLESGVPDRFSGSGSRTDFTLKISRVEAEDVGVYYCQQSFDDPFTFGQGTKLEIK

SEQ ID NO: 3119 - protein, 111 aa, synthetic construct
DIQLTQSPSSLSASVGDRVTITCRASESVDSSGNSFMHWYQQKPEKAPQSLIYRASNLESGVPSRFSGSGSRTDFTLTISSLQPEDFATYYCQQSFDDPFTFGQGTKLEIK

SEQ ID NO: 3120 - protein, 111 aa, synthetic construct
EIVLTQSPPTLSLSPGERVTLSCRASESVDSSGNSFMHWYQQKPGQAPQLLIYRASNLESGIPARFSGSGSRTDFTLTISSLQPEDFAVYYCQQSFDDPFTFGQGTKLEIK

SEQ ID NO: 3121 - protein, 111 aa, synthetic construct
DIQLTQSPSAMSASVGDRVTITCRASESVDSSGNSFMHWYQQKPGKVPQRLIYRASNLESGVPSRFSGSGSRTEFTLTISSLQPEDFATYYCQQSFDDPFTFGQGTKLEIK

SEQ ID NO: 3122 - protein, 111 aa, synthetic construct
DIVLTQSPLSLPVTPGEPASISCRASESVDSSGNSFMHWYLQKPGQSPQLLIYRASNLESGVPDRFSGSGSRTDFTLKISRVEAEDVGVYYCQQSFDDPFTFGQGTKLEIK

SEQ ID NO: 3123 - protein, 111 aa, synthetic construct
DIVLTQTPLSLPVTPGEPASISCRASESVDSSGNSFMHWYLQKPGQSPQLLIYRASNLESGVPDRFSGSGSRTDFTLKISRVEAEDVGVYYCQQSFDDPFTFGQGTKLEIK

SEQ ID NO: 3124 - protein, 111 aa, synthetic construct
DIVLTQTPLSLSVTPGQPASISCRASESVDSSGNSFMHWYLQKPGQSPQLLIYRASNLESGVPDRFSGSGSRTDFTLKISRVEAEDVGVYYCQQSFDDPFTFGQGTKLEIK

SEQ ID NO: 3125 - protein, 111 aa, synthetic construct
EIVLTQSPPTLSLSPGERVTLSCRASESVDSSGNSFMHWYQQKPGQAPQLLIYRASNLESSIPARFSGSGSRTDFTLTISSLQPEDFAVYYCQQSFDDPFTFGQGTKLEIK

SEQ ID NO: 3126 - protein, 111 aa, synthetic construct
DIVLTQSPLSLPVTLGQPASISCRASESVDSSGNSFMHWYQQRPGQSPQRLIYRASNLESGVPDRFSGSGSRTDFTLKISRVEAEDVGVYYCQQSFDDPFTFGQGTKLEIK

SEQ ID NO: 3127 - protein, 111 aa, synthetic construct
DIVLTQTPLSSPVTLGQPASISCRASESVDSSGNSFMHWYQQRPGQPPQLLIYRASNLESGVPDRFSGSGARTDFTLKISRVEAEDVGVYYCQQSFDDPFTFGQGTKLEIK

SEQ ID NO: 3128 - protein, 111 aa, synthetic construct
DIVLTQSPAFLSVTPGEKVTITCRASESVDSSGNSFMHWYQQKPDQAPQLLIYRASNLESGVPSRFSGSGSRTDFTFTISSLEAEDAATYYCQQSFDDPFTFGQGTKLEIK

SEQ ID NO: 3129 - protein, 111 aa, synthetic construct
DIQLIQSPSFLSASVGDRVSIICRASESVDSSGNSFMHWYLQKPGKSPQLFIYRASNLESGVSSRFSGRGSRTDFTLTIISLKPEDFAAYYCQQSFDDPFTFGQGTKLEIK

SEQ ID NO: 3130 - protein, 111 aa, synthetic construct
EIVLTQTPLSLSITPGEQASISCRASESVDSSGNSFMHWYLQKARPVPQLLIYRASNLESGVPDRFSGSGSRTDFTLKISRVEAEDFGVYYCQQSFDDPFTFGQGTKLEIK

SEQ ID NO: 3131 - protein, 111 aa, synthetic construct
EIVLTQTPLSLSITPGEQASMSCRASESVDSSGNSFMHWYLQKARPVPQLLIYRASNLESGVPDRFSGSGSRTDFTLKISRVEAEDFGVYYCQQSFDDPFTFGQGTKLEIK

SEQ ID NO: 3132 - protein, 111 aa, synthetic construct
EITLTQSPAFMSATPGDKVNISCRASESVDSSGNSFMHWYQQKPGEAPQFIIYRASNLESGIPPRFSGSGYRTDFTLTINNIESEDAAYYYCQQSFDDPFTFGQGTKLEIK

SEQ ID NO: 3133 - protein, 119 aa, synthetic construct
QVQLVQSGAEVKKPGASVKVSCKASGYAFSSSWMNWVRQAPGQGLEWIGRIYPGDGDTKYNGKFKGRATLTADKSTSTAYMELSSLRSEDTAVYYCARRGTGGWYFDVWGQGTTVTVSS

SEQ ID NO: 3134 - protein, 119 aa, synthetic construct
QVQLVQSGAEVKKPGSSVKVSCKASGYAFSSSWMNWVRQAPGQGLEWIGRIYPGDGDTKYNGKFKGRATLTADKSTSTAYMELSSLRSEDTAVYYCARRGTGGWYFDVWGQGTTVTVSS

SEQ ID NO: 3135 - protein, 119 aa, synthetic construct
QVQLVQSGAEVKKPGASVKVSCKASGYAFSSSWMNWVRQAPGKGLEWIGRIYPGDGDTKYNGKFKGRATLTADKSTSTAYMELSSLRSEDTAVYYCARRGTGGWYFDVWGQGTTVTVSS

SEQ ID NO: 3136 - protein, 119 aa, synthetic construct
QVQLVQSGAEVKKPGASVKVSCKASGYAFSSSWMNWVRQAPGQELEWIGRIYPGDGDTKYNGKFKGRATLTADKSISTAYMELSSLRSEDTATYYCARRGTGGWYFDVWGQGTTVTVSS

SEQ ID NO: 3137 - protein, 119 aa, synthetic construct
EVQLVQSGAEVKKPGATVKISCKASGYAFSSSWMNWVQQAPGKGLEWIGRIYPGDGDTKYNGKFKGRATLTADKSTSTAYMELSSLRSEDTAVYYCARRGTGGWYFDVWGQGTTVTVSS

SEQ ID NO: 3138 - protein, 119 aa, synthetic construct
QVQLVQSGAEVKKTGSSVKVSCKASGYAFSSSWMNWVRQAPGQALEWIGRIYPGDGDTKYNGKFKGRATLTADKSMSTAYMELSSLRSEDTAMYYCARRGTGGWYFDVWGQGTTVTVSS

SEQ ID NO: 3139 - protein, 119 aa, synthetic construct
QVQLVQSGAEVKKPGASVKVSCKASGYAFSSSWMNWVRQAPGQRLEWIGRIYPGDGDTKYNGKFKGRATLTADKSASTAYMELSSLRSEDMAVYYCARRGTGGWYFDVWGQGTTVTVSS

SEQ ID NO: 3140 - protein, 119 aa, synthetic construct
QVQLVQSGAEVKKPGASVKVSCKASGYAFSSSWMNWVRQAPGQGLEWIGRIYPGDGDTKYNGKFKGRATLTADKSTSTAYMELRSLRSDDMAVYYCARRGTGGWYFDVWGQGTTVTVSS

SEQ ID NO: 3141 - protein, 119 aa, synthetic construct
QVQLVQSGAEVKKPGASVKVSCKASGYAFSSSWMNWVRQAPGQRLEWIGRIYPGDGDTKYNGKFKGRATLTADKSASTAYMELSSLRSEDTAVYYCARRGTGGWYFDVWGQGTTVTVSS

SEQ ID NO: 3142 - protein, 119 aa, synthetic construct
QVQLVQSGAEVKKPGASVKVSCKASGYAFSSSWMNWVRQAPGQGLEWIGRIYPGDGDTKYNGKFKGRATLTADKSTSTAYMELRSLRSDDTAVYYCARRGTGGWYFDVWGQGTTVTVSS

SEQ ID NO: 3143 - protein, 119 aa, synthetic construct
QVQLVQSGAEVKKPGASVKVSCKASGYAFSSSWMNWVRQAPGQGLEWIGRIYPGDGDTKYNGKFKGRATLTADKSISTAYMELSRLRSDDTAVYYCARRGTGGWYFDVWGQGTTVTVSS

SEQ ID NO: 3144 - protein, 119 aa, synthetic construct
QVQLVQSGAEVKKPGASVKVSCKASGYAFSSSWMNWVRQAPGQGLEWIGRIYPGDGDTKYNGKFKGRATLTADKSISTAYMELSRLRSDDTVVYYCARRGTGGWYFDVWGQGTTVTVSS

SEQ ID NO: 3145 - protein, 119 aa, synthetic construct
QVQLVQSGAEVKKPGASVKVSCKASGYAFSSSWMNWVRQAPGQGLEWIGRIYPGDGDTKYNGKFKGWATLTADKSISTAYMELSRLRSDDTAVYYCARRGTGGWYFDVWGQGTTVTVSS

SEQ ID NO: 3146 - protein, 119 aa, synthetic construct
QVQLVQSGAEVKKPGASVKVSCKASGYAFSSSWMNWVRQATGQGLEWIGRIYPGDGDTKYNGKFKGRATLTANKSISTAYMELSSLRSEDTAVYYCARRGTGGWYFDVWGQGTTVTVSS

SEQ ID NO: 3147 - protein, 119 aa, synthetic construct
QVQLVQSGSELKKPGASVKVSCKASGYAFSSSWMNWVRQAPGQGLEWIGRIYPGDGDTKYNGKFKGRAVLSADKSVSTAYLQISSLKAEDTAVYYCARRGTGGWYFDVWGQGTTVTVSS

SEQ ID NO: 3148 - protein, 119 aa, synthetic construct
QVQLVQSGPEVKKPGTSVKVSCKASGYAFSSSWMNWVRQARGQRLEWIGRIYPGDGDTKYNGKFKGRATLTADKSTSTAYMELSSLRSEDTAVYYCARRGTGGWYFDVWGQGTTVTVSS

SEQ ID NO: 3149 - protein, 119 aa, synthetic construct
EVQLVQSGAEVKKPGESLKISCKASGYAFSSSWMNWVRQMPGKGLEWIGRIYPGDGDTKYNGKFKGQATLSADKSISTAYLQWSSLKASDTAMYYCARRGTGGWYFDVWGQGTTVTVSS

SEQ ID NO: 3150 - protein, 119 aa, synthetic construct
QVQLVQSGSELKKPGASVKVSCKASGYAFSSSWMNWVRQAPGQGLEWIGRIYPGDGDTKYNGKFKGRAVLSADKSVSMAYLQISSLKAEDTAVYYCARRGTGGWYFDVWGQGTTVTVSS

SEQ ID NO: 3151 - protein, 119 aa, synthetic construct
QVQLVQSGHEVKQPGASVKVSCKASGYAFSSSWMNWVPQAPGQGLEWIGRIYPGDGDTKYNGKFKGRAVLSADKSASTAYLQISSLKAEDMAMYYCARRGTGGWYFDVWGQGTTVTVSS

SEQ ID NO: 3152 - protein, 119 aa, synthetic construct
EVQLVQSGAEVKKPGESLKISCKASGYAFSSSWMNWVRQMPGKGLEWIGRIYPGDGDTKYNGKFKGQATLSADKPISTAYLQWSSLKASDTAMYYCARRGTGGWYFDVWGQGTTVTVSS

SEQ ID NO: 3153 - protein, 119 aa, synthetic construct
EVQLVQSGAEVKKPGESLRISCKASGYAFSSSWMNWVRQMPGKGLEWIGRIYPGDGDTKYNGKFKGQATLSADKSISTAYLQWSSLKASDTAMYYCARRGTGGWYFDVWGQGTTVTVSS

SEQ ID NO: 3154 - protein, 119 aa, synthetic construct
EVQLVQSGAEVKKPGESLRISCKASGYAFSSSWMNWVRQMPGKGLEWIGRIYPGDGDTKYNGKFKGHATLSADKSISTAYLQWSSLKASDTAMYYCARRGTGGWYFDVWGQGTTVTVSS

SEQ ID NO: 3155 - protein, 119 aa, synthetic construct
QVQLVQSGAEVKKTGSSVKVSCKASGYAFSSSWMNWVRQAPRQALEWIGRIYPGDGDTKYNGKFKGRATLTADKSMSTAYMELSSLRSEDTAMYYCARRGTGGWYFDVWGQGTTVTVSS

SEQ ID NO: 3156 - protein, 119 aa, synthetic construct
EVQLVESGGGLVQPGRSLRLSCTASGYAFSSSWMNWVRQAPGKGLEWIGRIYPGDGDTKYNGKFKGRATLSADKSKSIAYLQMNSLKTEDTAVYYCARRGTGGWYFDVWGQGTTVTVSS

SEQ ID NO: 3157 - protein, 119 aa, synthetic construct
EVQLVESGGGLVQPGPSLRLSCTASGYAFSSSWMNWVRQAPGKGLEWIGRIYPGDGDTKYNGKFKGRATLSADKSKSIAYLQMNSLKTEDTAVYYCARRGTGGWYFDVWGQGTTVTVSS

SEQ ID NO: 3158 - protein, 119 aa, synthetic construct
QVQLQESGPGLVKPSQTLSLTCTASGYAFSSSWMNWVRQPPGKGLEWIGRIYPGDGDTKYNGKFKGRATLSADKSKSQASLKLSSVTAADTAVYYCARRGTGGWYFDVWGQGTTVTVSS

SEQ ID NO: 3159 - protein, 119 aa, synthetic construct
QVQLQESGPGLVKPSGTLSLTCAASGYAFSSSWMNWVRQPPGKGLEWIGRIYPGDGDTKYNGKFKGRATLSADKSKSQASLKLSSVTAADTAVYYCARRGTGGWYFDVWGQGTTVTVSS

SEQ ID NO: 3160 - protein, 119 aa, synthetic construct
EVQLVESGGGLVKPGRSLRLSCTASGYAFSSSWMNWVRQAPGKGLEWIGRIYPGDGDTKYNGKFKGRATLSADKSKSIAYLQMNSLKTEDTAVYYCARRGTGGWYFDVWGQGTTVTVSS

SEQ ID NO: 3161 - protein, 119 aa, synthetic construct
EVQLVESGGGLVQPGGSLKLSCAASGYAFSSSWMNWVRQASGKGLEWIGRIYPGDGDTKYNGKFKGRATLSADKSKSTAYLQMNSLKTEDTAVYYCARRGTGGWYFDVWGQGTTVTVSS

SEQ ID NO: 3162 - protein, 119 aa, synthetic construct
QVQLQESGPGLVKPSQTLSLTCAASGYAFSSSWMNWVRQPPGKGLEWIGRIYPGDGDTKYNGKFKGRATLSADKSKSQASLKLSSVTAADTAVYYCARRGTGGWYFDVWGQGTTVTVSS

SEQ ID NO: 3163 - protein, 119 aa, synthetic construct
EVQLVESGGGLVKPGGSLRLSCAASGYAFSSSWMNWVRQAPGKGLEWIGRIYPGDGDTKYNGKFKGRATLSADKSKSTAYLQMNSLKTEDTAVYYCARRGTGGWYFDVWGQGTTVTVSS

SEQ ID NO: 3164 - protein, 119 aa, synthetic construct
EVQLVESGGALVKPGGSLRLSCAASGYAFSSSWMNWVRQAPGKGLEWIGRIYPGDGDTKYNGKFKGRATLSADKSKSTAYLQMNSLKTEDTAVYYCARRGTGGWYFDVWGQGTTVTVSS

SEQ ID NO: 3165 - protein, 119 aa, synthetic construct
QVQLQESGPGLVKPSQTLSLTCAAYGYAFSSSWMNWVRQPPGKGLEWIGRIYPGDGDTKYNGKFKGRATLSADKSKSQASLKLSSVTAADTAVYYCARRGTGGWYFDVWGQGTTVTVSS

SEQ ID NO: 3166 - protein, 119 aa, synthetic construct
QVQLQESGSGLVKPSQTLSLTCAASGYAFSSSWMNWVRQPPGKGLEWIGRIYPGDGDTKYNGKFKGRATLSADKSKSQASLKLSSVTAADTAVYYCARRGTGGWYFDVWGQGTTVTVSS

SEQ ID NO: 3167 - protein, 119 aa, synthetic construct
EVQLVESGGGLVQPGGSLRLSCAASGYAFSSSWMNWVRQAPGKGLEWIGRIYPGDGDTKYNGKFKGRATLSADKSKSSAYLQMNSLKTEDTAVYYCARRGTGGWYFDVWGQGTTVTVSS

SEQ ID NO: 3168 - protein, 119 aa, synthetic construct
QVQLQESGPGLVKPSDTLSLTCTASGYAFSSSWMNWVRQPPGKGLEWIGRIYPGDGDTKYNGKFKGRATLSADKSKSQASLKLSSVTAADTAVYYCARRGTGGWYFDVWGQGTTVTVSS

SEQ ID NO: 3169 - protein, 119 aa, synthetic construct
QVQLQESGPGLVKPSQTLSLTCTASGYAFSSSWMNWVRQHPGKGLEWIGRIYPGDGDTKYNGKFKGRATLSADKSKSQASLKLSSVTAADTAVYYCARRGTGGWYFDVWGQGTTVTVSS

SEQ ID NO: 3170 - protein, 119 aa, synthetic construct
QVQLQESGPGLVKPSQTLSLTCTASGYAFSSSWMNWVRQHPGKGLEWIGRIYPGDGDTKYNGKFKGLATLSADKSKSQASLKLSSVTAADTAVYYCARRGTGGWYFDVWGQGTTVTVSS

SEQ ID NO: 3171 - protein, 119 aa, synthetic construct
QVQLVESGGGVVQPGRSLRLSCAASGYAFSSSWMNWVRQAPGKGLEWIGRIYPGDGDTKYNGKFKGRATLSADKSKSTAYLQMSSLRAEDTAVYYCARRGTGGWYFDVWGQGTTVTVSS

SEQ ID NO: 3172 - protein, 119 aa, synthetic construct
QVQLVESGGGLVKPGGSLRLSCAASGYAFSSSWMNWVRQAPGKGLEWIGRIYPGDGDTKYNGKFKGRATLSADKAKSSAYLQMNSLRAEDTAVYYCARRGTGGWYFDVWGQGTTVTVSS

SEQ ID NO: 3173 - protein, 119 aa, synthetic construct
QVQLVESGGGLVQPGGSLRLSCSASGYAFSSSWMNWVRQAPGKGLEWIGRIYPGDGDTKYNGKFKGRATLSADKSKSTAYLQMNSLRAEDTAVYYCARRGTGGWYFDVWGQGTTVTVSS

SEQ ID NO: 3174 - protein, 119 aa, synthetic construct
QVQLLESGGGLVKPGGSLRLSCAASGYAFSSSWMNWVRQAPGKGLEWIGRIYPGDGDTKYNGKFKGRATLSADKAKSSAYLQMNSLRAEDTAVYYCARRGTGGWYFDVWGQGTTVTVSS

SEQ ID NO: 3175 - protein, 119 aa, synthetic construct
EVQLVESGGGLVQPGGSLRLSCSASGYAFSSSWMNWVRQAPGKGLEWIGRIYPGDGDTKYNGKFKGRATLSADKSKSTAYLQMSSLRAEDTAVYYCARRGTGGWYFDVWGQGTTVTVSS

SEQ ID NO: 3176 - protein, 119 aa, synthetic construct
QVQLQESGPGLVKPSDTLSLTCAASGYAFSSSWMNWVRQPPGKGLEWIGRIYPGDGDTKYNGKFKGRATLSADKSKSQASLKLSSVTAVDTAVYYCARRGTGGWYFDVWGQGTTVTVSS

SEQ ID NO: 3177 - protein, 119 aa, synthetic construct
QVQLQESGPGLVKPSQTLSLTCAASGYAFSSSWMNWVRQPPGKGLEWIGRIYPGDGDTKYNGKFKGRATLSADKSKSQASLKLSSVTAVDTAVYYCARRGTGGWYFDVWGQGTTVTVSS

SEQ ID NO: 3178 - protein, 119 aa, synthetic construct
EVQLVESGGGLVQPGGSLRLSCSASGYAFSSSWMNWVRQAPGKGLEWIGRIYPGDGDTKYNGKFKGRATLSADKSKSTAYVQMSSLRAEDTAVYYCARRGTGGWYFDVWGQGTTVTVSS

SEQ ID NO: 3179 - protein, 119 aa, synthetic construct
QVQLVDSGGGVVQPGRSLRLSCAASGYAFSSSWMNWVRQAPGKGLEWIGRIYPGDGDTKYNGKFKGRATLSADKSKSTAYLQMNSLRAEDTAVYYCARRGTGGWYFDVWGQGTTVTVSS

SEQ ID NO: 3180 - protein, 119 aa, synthetic construct
QVQLVESGGGVVQPGRSLRLSCAASGYAFSSSWMNWVRQAPGKGLEWIGRIYPGDGDTKYNGKFKGRATLSADKSKSTAYLQMNSLRAEGTAVYYCARRGTGGWYFDVWGQGTTVTVSS

SEQ ID NO: 3181 - protein, 119 aa, synthetic construct
QVQLVESGGGVVQPGRSLRLSCAASGYAFSSSWMNWVRQAPGKGLEWIGRIYPGDGDTKYNGKFKGRATLSADKSKSTAYLQMNSLRAEDTAVYYCARRGTGGWYFDVWGQGTTVTVSS

SEQ ID NO: 3182 - protein, 119 aa, synthetic construct
EVQLVESGGGLVQPGGSLRLSCAASGYAFSSSWMNWVRQAPGKGLEWIGRIYPGDGDTKYNGKFKGRATLSADKSKSTAYLQMNSLRAEDTAVYYCARRGTGGWYFDVWGQGTTVTVSS

SEQ ID NO: 3183 - protein, 117 aa, synthetic construct
EVQLVESGGDLVKPGGSLKLSCAVSGFTFRSYGMSWVRQTPDKRLEWVALISSGGSYTYYTDSVKGRFTISRDNAKNTLYLQMSSLKSEDTAIYYCSRHGGNFFDYWGQGTTLTVSS

SEQ ID NO: 3184 - protein, 107 aa, synthetic construct
QIVLTQSPSIMSASPGEKVTMTCSVSSSVSYMHWYQQKSGTSPKRWIYDTSKLASGVPARFSGSGSGTSYSLTISSMEAEDAATYYCQQWSSNPQYTFGGGTKLEIK

SEQ ID NO: 3185 - protein, 107 aa, synthetic construct
DIVLTQSPAFLSVTPGEKVTITCSVSSSVSYMHWYQQKPDQAPKLLIYDTSKLASGVPSRFSGSGSGTDYTFTISSLEAEDAATYYCQQWSSNPQYTFGQGTKLEIK

SEQ ID NO: 3186 - protein, 107 aa, synthetic construct
AIQLTQSPSSLSASVGDRVTITCSVSSSVSYMHWYQQKPGKAPKLLIYDTSKLASGVPSRFSGSGSGTDYTLTISSLQPEDFATYYCQQWSSNPQYTFGQGTKLEIK

SEQ ID NO: 3187 - protein, 107 aa, synthetic construct
DIQLTQSPSFLSASVGDRVTITCSVSSSVSYMHWYQQKPGKAPKLLIYDTSKLASGVPSRFSGSGSGTEYTLTISSLQPEDFATYYCQQWSSNPQYTFGQGTKLEIK

SEQ ID NO: 3188 - protein, 107 aa, synthetic construct
DIQLTQSPSSLSASVGDRVTITCSVSSSVSYMHWYQQKPGKAPKLLIYDTSKLASGVPSRFSGSGSGTDYTLTISSLQPEDFATYYCQQWSSNPQYTFGQGTKLEIK

SEQ ID NO: 3189 - protein, 107 aa, synthetic construct
DIQLTQSPSSVSASVGDRVTITCSVSSSVSYMHWYQQKPGKAPKLLIYDTSKLASGVPSRFSGSGSGTDYTLTISSLQPEDFATYYCQQWSSNPQYTFGQGTKLEIK

SEQ ID NO: 3190 - protein, 107 aa, synthetic construct
DIQLTQSPSSLSASVGDRVTITCSVSSSVSYMHWYQQKPGKVPKLLIYDTSKLASGVPSRFSGSGSGTDYTLTISSLQPEDVATYYCQQWSSNPQYTFGQGTKLEIK

SEQ ID NO: 3191 - protein, 107 aa, synthetic construct
DIQLTQSPSSLSASVGDRVTITCSVSSSVSYMHWYQQKPGQAPKLLIYDTSKLASGVPSRFSGSGSGTDYTLTISSLQPEDVATYYCQQWSSNPQYTFGQGTKLEIK

SEQ ID NO: 3192 - protein, 107 aa, synthetic construct
EIVLTQSPDFQSVTPKEKVTITCSVSSSVSYMHWYQQKPDQSPKLLIYDTSKLASGVPSRFSGSGSGTDYTLTINSLEAEDAATYYCQQWSSNPQYTFGQGTKLEIK

SEQ ID NO: 3193 - protein, 107 aa, synthetic construct
AIRLTQSPFSLSASVGDRVTITCSVSSSVSYMHWYQQKPAKAPKLFIYDTSKLASGVPSRFSGSGSGTDYTLTISSLQPEDFATYYCQQWSSNPQYTFGQGTKLEIK

SEQ ID NO: 3194 - protein, 107 aa, synthetic construct
DIQLTQSPSSLSASVGDRVTITCSVSSSVSYMHWYQQKPGKAPKLLIYDTSKLASGVPSRFSGSGSGTDYTFTISSLQPEDIATYYCQQWSSNPQYTFGQGTKLEIK

SEQ ID NO: 3195 - protein, 107 aa, synthetic construct
EIVLTQSPATLSLSPGERATLSCSVSSSVSYMHWYQQKPGQAPKLLIYDTSKLASGIPARFSGSGSGTDYTLTISSLEPEDFAVYYCQQWSSNPQYTFGQGTKLEIK

SEQ ID NO: 3196 - protein, 107 aa, synthetic construct
DIQLTQSPSTLSASVGDRVTITCSVSSSVSYMHWYQQKPGKAPKLLIYDTSKLASGVPSRFSGSGSGTEYTLTISSLQPDDFATYYCQQWSSNPQYTFGQGTKLEIK

SEQ ID NO: 3197 - protein, 107 aa, synthetic construct
DIQLTQSPSSLSASVGDRVTITCSVSSSVSYMHWYQQKPGKTPKLLIYDTSKLASGIPSRFSGSGSGTDYTLTIRSLQPEDFATYYCQQWSSNPQYTFGQGTKLEIK

SEQ ID NO: 3198 - protein, 107 aa, synthetic construct
EIVLTQSPPTLSLSPGERVTLSCSVSSSVSYMHWYQQKPGQAPKLLIYDTSKLASGIPARFSGSGSGTDYTLTISSLQPEDFAVYYCQQWSSNPQYTFGQGTKLEIK

SEQ ID NO: 3199 - protein, 107 aa, synthetic construct
DIQLTQSPSSLSASVGDRVTITCSVSSSVSYMHWYQQKPGKAPKRLIYDTSKLASGVPSRFSGSGSGTEYTLTISSLQPEDFATYYCQQWSSNPQYTFGQGTKLEIK

SEQ ID NO: 3200 - protein, 107 aa, synthetic construct
EIVLTQSPATLSLSPGERATLSCSVSSSVSYMHWYQQKPGQAPKLLIYDTSKLASGIPARFSGSGPGTDYTLTISSLEPEDFAVYYCQQWSSNPQYTFGQGTKLEIK

SEQ ID NO: 3201 - protein, 107 aa, synthetic construct
EIVLTQSPATLSLSPGERATLSCSVSSSVSYMHWYQQKPGQAPKLLIYDTSKLASGIPARFSGSGSGTDYTLTISRLEPEDFAVYYCQQWSSNPQYTFGQGTKLEIK

SEQ ID NO: 3202 - protein, 107 aa, synthetic construct
EIVLTQSPATLSLSPGERATLSCSVSSSVSYMHWYQQKPGQAPKLLIYDTSKLASGIPARFSGSGSGTDYTLTISSLQPEDFAVYYCQQWSSNPQYTFGQGTKLEIK

SEQ ID NO: 3203 - protein, 107 aa, synthetic construct
EIVLTQSPATLSVSPGERATLSCSVSSSVSYMHWYQQKPGQAPKLLIYDTSKLASGIPARFSGSGSGTEYTLTISSLQSEDFAVYYCQQWSSNPQYTFGQGTKLEIK

SEQ ID NO: 3204 - protein, 107 aa, synthetic construct
EIVLTQSPATLSVSPGERATLSCSVSSSVSYMHWYQQKPGQAPKLLIYDTSKLASGIPARFSGSGSGTEYTLTISILQSEDFAVYYCQQWSSNPQYTFGQGTKLEIK

SEQ ID NO: 3205 - protein, 107 aa, synthetic construct
EIVLTQSPPTLSLSPGERVTLSCSVSSSVSYMHWYQQKPGQAPKLLIYDTSKLASSIPARFSGSGSGTDYTLTISSLQPEDFAVYYCQQWSSNPQYTFGQGTKLEIK

SEQ ID NO: 3206 - protein, 107 aa, synthetic construct
DIQLTQSPSSLSASVGDRVTITCSVSSSVSYMHWYQQKPGKAPKSLIYDTSKLASGVPSRFSGSGSGTDYTLTISSLQPEDFATYYCQQWSSNPQYTFGQGTKLEIK

SEQ ID NO: 3207 - protein, 107 aa, synthetic construct
DIQLTQSPSSLSASVGDRVTITCSVSSSVSYMHWYQQKPGKAPKRLIYDTSKLASGVPSRFSGSGSGTEYTLTISNLQPEDFATYYCQQWSSNPQYTFGQGTKLEIK

SEQ ID NO: 3208 - protein, 107 aa, synthetic construct
DIQLTQSPSAMSASVGDRVTITCSVSSSVSYMHWYQQKPGKVPKRLIYDTSKLASGVPSRFSGSGSGTEYTLTISSLQPEDFATYYCQQWSSNPQYTFGQGTKLEIK

SEQ ID NO: 3209 - protein, 107 aa, synthetic construct
EIVLTQSPATLSLSPGERATLSCSVSSSVSYMHWYQQKPGQAPKLLIYDTSKLASGIPDRFSGSGSGTDYTLTISRLEPEDFAVYYCQQWSSNPQYTFGQGTKLEIK

SEQ ID NO: 3210 - protein, 107 aa, synthetic construct
EIVLTQSPATLSLSPGERATLSCSVSSSVSYMHWYQQKPGLAPKLLIYDTSKLASGIPDRFSGSGSGTDYTLTISRLEPEDFAVYYCQQWSSNPQYTFGQGTKLEIK

SEQ ID NO: 3211 - protein, 107 aa, synthetic construct
EIVLTQSPGTLSLSPGERATLSCSVSSSVSYMHWYQQKPGQAPKLLIYDTSKLASGIPDRFSGSGSGTDYTLTISRLEPEDFAVYYCQQWSSNPQYTFGQGTKLEIK

SEQ ID NO: 3212 - protein, 107 aa, synthetic construct
DIQLTQSPSSLSASVGDRVTITCSVSSSVSYMHWYQQKPGKAPKSLIYDTSKLASGVPSKFSGSGSGTDYTLTISSLQPEDFATYYCQQWSSNPQYTFGQGTKLEIK

SEQ ID NO: 3213 - protein, 107 aa, synthetic construct
DIQLTQSPSSLSASVGDRVTITCSVSSSVSYMHWYQQKPEKAPKSLIYDTSKLASGVPSRFSGSGSGTDYTLTISSLQPEDFATYYCQQWSSNPQYTFGQGTKLEIK

SEQ ID NO: 3214 - protein, 107 aa, synthetic construct
DIVLTQSPDSLAVSLGERATINCSVSSSVSYMHWYQQKPGQPPKLLIYDTSKLASGVPDRFSGSGSGTDYTLTISSLQAEDVAVYYCQQWSSNPQYTFGQGTKLEIK

SEQ ID NO: 3215 - protein, 107 aa, synthetic construct
EIVLTQTPLSLSITPGEQASMSCSVSSSVSYMHWYLQKARPVPKLLIYDTSKLASGVPDRFSGSGSGTDYTLKISRVEAEDFGVYYCQQWSSNPQYTFGQGTKLEIK

SEQ ID NO: 3216 - protein, 107 aa, synthetic construct
EIVLTQTPLSLSITPGEQASISCSVSSSVSYMHWYLQKARPVPKLLIYDTSKLASGVPDRFSGSGSGTDYTLKISRVEAEDFGVYYCQQWSSNPQYTFGQGTKLEIK

SEQ ID NO: 3217 - protein, 107 aa, synthetic construct
DIVLTQSPLSLPVTPGEPASISCSVSSSVSYMHWYLQKPGQSPKLLIYDTSKLASGVPDRFSGSGSGTDYTLKISRVEAEDVGVYYCQQWSSNPQYTFGQGTKLEIK

SEQ ID NO: 3218 - protein, 107 aa, synthetic construct
DIVLTQSPLSLPVTLGQPASISCSVSSSVSYMHWYQQRPGQSPKRLIYDTSKLASGVPDRFSGSGSGTDYTLKISRVEAEDVGVYYCQQWSSNPQYTFGQGTKLEIK

SEQ ID NO: 3219 - protein, 107 aa, synthetic construct
DIVLTQTPLSLPVTPGEPASISCSVSSSVSYMHWYLQKPGQSPKLLIYDTSKLASGVPDRFSGSGSGTDYTLKISRVEAEDVGVYYCQQWSSNPQYTFGQGTKLEIK

SEQ ID NO: 3220 - protein, 107 aa, synthetic construct
DIVLTQTPLSLSVTPGQPASISCSVSSSVSYMHWYLQKPGQSPKLLIYDTSKLASGVPDRFSGSGSGTDYTLKISRVEAEDVGVYYCQQWSSNPQYTFGQGTKLEIK

SEQ ID NO: 3221 - protein, 107 aa, synthetic construct
DIVLTQTPLSLSVTPGQPASISCSVSSSVSYMHWYLQKPGQPPKLLIYDTSKLASGVPDRFSGSGSGTDYTLKISRVEAEDVGVYYCQQWSSNPQYTFGQGTKLEIK

SEQ ID NO: 3222 - protein, 107 aa, synthetic construct
DIQLIQSPSFLSASVGDRVSIICSVSSSVSYMHWYLQKPGKSPKLFIYDTSKLASGVSSRFSGRGSGTDYTLTIISLKPEDFAAYYCQQWSSNPQYTFGQGTKLEIK

SEQ ID NO: 3223 - protein, 107 aa, synthetic construct
DIVLTQTPLSSPVTLGQPASISCSVSSSVSYMHWYQQRPGQPPKLLIYDTSKLASGVPDRFSGSGAGTDYTLKISRVEAEDVGVYYCQQWSSNPQYTFGQGTKLEIK

SEQ ID NO: 3224 - protein, 107 aa, synthetic construct
EITLTQSPAFMSATPGDKVNISCSVSSSVSYMHWYQQKPGEAPKFIIYDTSKLASGIPPRFSGSGYGTDYTLTINNIESEDAAYYYCQQWSSNPQYTFGQGTKLEIK

SEQ ID NO: 3225 - protein, 117 aa, synthetic construct
EVQLVESGGGLVKPGGSLRLSCAVSGFTFRSYGMSWVRQAPGKGLEWVALISSGGSYTYYTDSVKGRFTISRDNSKNTLYLQMNSLKTEDTAVYYCSRHGGNFFDYWGQGTTVTVSS

SEQ ID NO: 3226 - protein, 117 aa, synthetic construct
EVQLVESGGALVKPGGSLRLSCAVSGFTFRSYGMSWVRQAPGKGLEWVALISSGGSYTYYTDSVKGRFTISRDNSKNTLYLQMNSLKTEDTAVYYCSRHGGNFFDYWGQGTTVTVSS

SEQ ID NO: 3227 - protein, 117 aa, synthetic construct
EVQLVESGGGLVQPGGSLRLSCAVSGFTFRSYGMSWVRQAPGKGLEWVALISSGGSYTYYTDSVKGRFTISRDNAKNTLYLQMNSLRAEDTAVYYCSRHGGNFFDYWGQGTTVTVSS

SEQ ID NO: 3228 - protein, 117 aa, synthetic construct
EVQLVESGGGLVQPGGSLRLSCAVSGFTFRSYGMSWVRQAPGKGLEWVALISSGGSYTYYTDSVKGRFTISRDNAKNSLYLQMNSLRAEDTAVYYCSRHGGNFFDYWGQGTTVTVSS

SEQ ID NO: 3229 - protein, 117 aa, synthetic construct
EVQLVESGGGLVQPGGSLRLSCAVSGFTFRSYGMSWVRQAPGKGLEWVALISSGGSYTYYTDSVKGRFTISRDNSKNSLYLQMNSLKTEDTAVYYCSRHGGNFFDYWGQGTTVTVSS

SEQ ID NO: 3230 - protein, 117 aa, synthetic construct
EVQLVESGGGLVQPGGSLRLSCAVSGFTFRSYGMSWVRQAPGKGLEWVALISSGGSYTYYTDSVKGRFTISRDNAKNSLYLQMNSLRAEDMAVYYCSRHGGNFFDYWGQGTTVTVSS

SEQ ID NO: 3231 - protein, 117 aa, synthetic construct
EVQLVESGGGLVQPGGSLRLSCAVSGFTFRSYGMSWVRQAPGKGLEWVALISSGGSYTYYTDSVKGQFTISRDNAKNTLYLQMNSLRAEDMAVYYCSRHGGNFFDYWGQGTTVTVSS

SEQ ID NO: 3232 - protein, 117 aa, synthetic construct
EVQLVESGGGLVKPGRSLRLSCTVSGFTFRSYGMSWVRQAPGKGLEWVALISSGGSYTYYTDSVKGRFTISRDNSKNILYLQMNSLKTEDTAVYYCSRHGGNFFDYWGQGTTVTVSS

SEQ ID NO: 3233 - protein, 117 aa, synthetic construct
EVQLVESGGGLVKPGGSLRLSCAVSGFTFRSYGMSWVRQAPGKGLEWVALISSGGSYTYYTDSVKGRFTISRDNAKNSLYLQMNSLRAEDTAVYYCSRHGGNFFDYWGQGTTVTVSS

SEQ ID NO: 3234 - protein, 117 aa, synthetic construct
EVQLVESGGGLVQPGGSLKLSCAVSGFTFRSYGMSWVRQASGKGLEWVALISSGGSYTYYTDSVKGRFTISRDNSKNTLYLQMNSLKTEDTAVYYCSRHGGNFFDYWGQGTTVTVSS

SEQ ID NO: 3235 - protein, 117 aa, synthetic construct
QVQLVESGGGVVQPGGSLRLSCAVSGFTFRSYGMSWVRQAPGKGLEWVALISSGGSYTYYTDSVKGRFTISRDNSKNTLYLQMNSLRAEDTAVYYCSRHGGNFFDYWGQGTTVTVSS

SEQ ID NO: 3236 - protein, 117 aa, synthetic construct
QVQLVESGGGVVQPGRSLRLSCAVSGFTFRSYGMSWVRQAPGKGLEWVALISSGGSYTYYTDSVKGRFTISRDNSKNTLYLQMSSLRAEDTAVYYCSRHGGNFFDYWGQGTTVTVSS

SEQ ID NO: 3237 - protein, 117 aa, synthetic construct
EVQLVESGGGLVQPGGSLRLSCPVSGFTFRSYGMSWVRQAPGKGLEWVALISSGGSYTYYTDSVKGRFTISRDNANNSLYLQMNSLRAEDTAVYYCSRHGGNFFDYWGQGTTVTVSS

SEQ ID NO: 3238 - protein, 117 aa, synthetic construct
EVQLVESGGGLVQPGRSLRLSCTVSGFTFRSYGMSWVRQAPGKGLEWVALISSGGSYTYYTDSVKGRFTISRDNSKNILYLQMNSLKTEDTAVYYCSRHGGNFFDYWGQGTTVTVSS

SEQ ID NO: 3239 - protein, 117 aa, synthetic construct
EVQLVESGGGLVQPGPSLRLSCTVSGFTFRSYGMSWVRQAPGKGLEWVALISSGGSYTYYTDSVKGRFTISRDNSKNILYLQMNSLKTEDTAVYYCSRHGGNFFDYWGQGTTVTVSS

SEQ ID NO: 3240 - protein, 117 aa, synthetic construct
EVQLVESGGGLVQPGGSLRLSCAVSGFTFRSYGMSWVRQAPGKGLEWVALISSGGSYTYYTDSVKGRFTISRDNSKNTLYLQMNSLRAEDTAVYYCSRHGGNFFDYWGQGTTVTVSS

SEQ ID NO: 3241 - protein, 117 aa, synthetic construct
EVQLVESGGGLVQPGGSLRLSCAVSGFTFRSYGMSWVRQAPGKGLEWVALISSGGSYTYYTDSVKGRFTISRDNAKNSLYLQMNSLRDEDTAVYYCSRHGGNFFDYWGQGTTVTVSS

SEQ ID NO: 3242 - protein, 117 aa, synthetic construct
QVQLVESGGGLVKPGGSLRLSCAVSGFTFRSYGMSWVRQAPGKGLEWVALISSGGSYTYYTDSVKGRFTISRDNAKNSLYLQMNSLRAEDTAVYYCSRHGGNFFDYWGQGTTVTVSS

SEQ ID NO: 3243 - protein, 117 aa, synthetic construct
QVQLVESGGGVVQPGRSLRLSCAVSGFTFRSYGMSWVRQAPGKGLEWVALISSGGSYTYYTDSVKGRFTISRDNSKNTLYLQMNSLRAEDTAVYYCSRHGGNFFDYWGQGTTVTVSS

SEQ ID NO: 3244 - protein, 117 aa, synthetic construct
EVQLLESGGGLVQPGGSLRLSCAVSGFTFRSYGMSWVRQAPGKGLEWVALISSGGSYTYYTDSVKGRFTISRDNSKNTLYLQMNSLRAEDTAVYYCSRHGGNFFDYWGQGTTVTVSS

SEQ ID NO: 3245 - protein, 117 aa, synthetic construct
EVQLVESGGGLVQPGGSLRLSCAVSGFTFRSYGMSWVRQAPGKGLEWVALISSGGSYTYYTDSVKGRFTISRHNSKNTLYLQMNSLRAEDTAVYYCSRHGGNFFDYWGQGTTVTVSS

SEQ ID NO: 3246 - protein, 117 aa, synthetic construct
EVQLVESGGGLIQPGGSLRLSCAVSGFTFRSYGMSWVRQPPGKGLEWVALISSGGSYTYYTDSVKGRFTISRDNSKNTLYLQMNSLRAEDTAVYYCSRHGGNFFDYWGQGTTVTVSS

SEQ ID NO: 3247 - protein, 117 aa, synthetic construct
EVQLVESGGGLIQPGGSLRLSCAVSGFTFRSYGMSWVRQAPGKGLEWVALISSGGSYTYYTDSVKGRFTISRDNSKNTLYLQMNSLRAEDTAVYYCSRHGGNFFDYWGQGTTVTVSS

SEQ ID NO: 3248 - protein, 117 aa, synthetic construct
EVQLVESGGGLVQPGRSLRLSCAVSGFTFRSYGMSWVRQAPGKGLEWVALISSGGSYTYYTDSVKGRFTISRDNAKNSLYLQMNSLRAEDTALYYCSRHGGNFFDYWGQGTTVTVSS

SEQ ID NO: 3249 - protein, 117 aa, synthetic construct
QVQLVESGGGVVQPGRSLRLSCAVSGFTFRSYGMSWVRQAPGKGLEWVALISSGGSYTYYTDSVKGRFTISRDNSKNRLYLQMNSLRAEDTAVYYCSRHGGNFFDYWGQGTTVTVSS

SEQ ID NO: 3250 - protein, 117 aa, synthetic construct
QVQLVESGGGVVQPGRSLRLSCAVSGFTFRSYGMSWVRQAPGKGLEWVALISSGGSYTYYTDSVKGRFTISRDNSKNTLYLQMNSLRAEGTAVYYCSRHGGNFFDYWGQGTTVTVSS

SEQ ID NO: 3251 - protein, 117 aa, synthetic construct
QVQLVESGGGVVQPGRSLRLSCAVSGFTFRSYGMSWVRQAPGKGLEWVALISSGGSYTYYTDSVKGRFAISRDNSKNTLYLQMNSLRAEDTAVYYCSRHGGNFFDYWGQGTTVTVSS

SEQ ID NO: 3252 - protein, 117 aa, synthetic construct
QVQLVDSGGGVVQPGRSLRLSCAVSGFTFRSYGMSWVRQAPGKGLEWVALISSGGSYTYYTDSVKGRFTISRDNSKNTLYLQMNSLRAEDTAVYYCSRHGGNFFDYWGQGTTVTVSS

SEQ ID NO: 3253 - protein, 117 aa, synthetic construct
EVQLVESGGGVVRPGGSLRLSCAVSGFTFRSYGMSWVRQAPGKGLEWVALISSGGSYTYYTDSVKGRFTISRDNAKNSLYLQMNSLRAEDTALYHCSRHGGNFFDYWGQGTTVTVSS

SEQ ID NO: 3254 - protein, 117 aa, synthetic construct
EVQLVESGGVVVQPGGSLRLSCAVSGFTFRSYGMSWVRQAPGKGLEWVALISSGGSYTYYTDSVKGRFTISRDNSKNSLYLQMNSLRAEDTALYYCSRHGGNFFDYWGQGTTVTVSS

SEQ ID NO: 3255 - protein, 117 aa, synthetic construct
EVQLVESGGGVVQPGGSLRLSCAVSGFTFRSYGMSWVRQAPGKGLEWVALISSGGSYTYYTDSVKGRFTISRDNSKNSLYLQMNSLRTEDTALYYCSRHGGNFFDYWGQGTTVTVSS

SEQ ID NO: 3256 - protein, 117 aa, synthetic construct
EVQLVESGGVVVQPGGSLRLSCAVSGFTFRSYGMSWVRQAPGKGLEWVALISSGGSYTYYTDSVKGRFTISRDNSKNSLYLQMNSLRTEDTALYYCSRHGGNFFDYWGQGTTVTVSS

SEQ ID NO: 3257 - protein, 117 aa, synthetic construct
EVQLVETGGGLIQPGGSLRLSCAVSGFTFRSYGMSWVRQAPGKGLEWVALISSGGSYTYYTDSVKGRFTISRDNSKNTLYLQMNSLRAEDTAVYYCSRHGGNFFDYWGQGTTVTVSS

SEQ ID NO: 3258 - protein, 117 aa, synthetic construct
EVQLVESGGGLVQPGGSLRLSCAVSGFTFRSYGMSWVRQATGKGLEWVALISSGGSYTYYTDSVKGRFTISRENAKNSLYLQMNSLRAGDTAVYYCSRHGGNFFDYWGQGTTVTVSS

SEQ ID NO: 3259 - protein, 117 aa, synthetic construct
EVQLVESRGVLVQPGGSLRLSCAVSGFTFRSYGMSWVRQAPGKGLEWVALISSGGSYTYYTDSVKGRFTISRDNSKNTLHLQMNSLRAEDTAVYYCSRHGGNFFDYWGQGTTVTVSS

SEQ ID NO: 3260 - protein, 117 aa, synthetic construct
EVQLVESGGGLVQPGRSLRLSCAVSGFTFRSYGMSWVRQAPGKGLEWVALISSGGSYTYYTDSVKGRFTISRDNAKNSLYLQMNSLRAEDMALYYCSRHGGNFFDYWGQGTTVTVSS

SEQ ID NO: 3261 - protein, 117 aa, synthetic construct
QVQLVESGGGLVQPGGSLRLSCSVSGFTFRSYGMSWVRQAPGKGLEWVALISSGGSYTYYTDSVKGRFTISRDNSKNTLYLQMNSLRAEDTAVYYCSRHGGNFFDYWGQGTTVTVSS

SEQ ID NO: 3262 - protein, 117 aa, synthetic construct
EVQLVESGGGLVQPGGSLRLSCSVSGFTFRSYGMSWVRQAPGKGLEWVALISSGGSYTYYTDSVKGRFTISRDNSKNTLYLQMSSLRAEDTAVYYCSRHGGNFFDYWGQGTTVTVSS

SEQ ID NO: 3263 - protein, 117 aa, synthetic construct
QVQLVESGGGVVQPGRSLRLSCAVSGFTFRSYGMSWVRQAPGKGLEWVALISSGGSYTYYTDSVKGRFTISRDNSTNTLFLQMNSLRAEDTAVYYCSRHGGNFFDYWGQGTTVTVSS

SEQ ID NO: 3264 - protein, 117 aa, synthetic construct
QVQLLESGGGLVKPGGSLRLSCAVSGFTFRSYGMSWVRQAPGKGLEWVALISSGGSYTYYTDSVKGRFTISRDNAKNSLYLQMNSLRAEDTAVYYCSRHGGNFFDYWGQGTTVTVSS

SEQ ID NO: 3265 - protein, 117 aa, synthetic construct
EVQLVESGEGLVQPGGSLRLSCAVSGFTFRSYGMSWVRQAPGKGLEWVALISSGGSYTYYTDSVKGRFTISRDNSKNTLYLQMGSLRAEDMAVYYCSRHGGNFFDYWGQGTTVTVSS

SEQ ID NO: 3266 - protein, 117 aa, synthetic construct
EVQLVESGGGLVQPGGSLRLSCAVSGFTFRSYGMSWVRQAPGKGLEWVALISSGGSYTYYTDSVKGRFTISRDNSKNTLYLQMGSLRAEDMAVYYCSRHGGNFFDYWGQGTTVTVSS

SEQ ID NO: 3267 - protein, 117 aa, synthetic construct
EVQLVESGGGLVQPGGSLRLSCSVSGFTFRSYGMSWVRQAPGKGLEWVALISSGGSYTYYTDSVKGRFTISRDNSKNTLYVQMSSLRAEDTAVYYCSRHGGNFFDYWGQGTTVTVSS

SEQ ID NO: 3268 - protein, 117 aa, synthetic construct
EVQLVESGGGLVQPGGSLRLSCAVSGFTFRSYGMSWVRQAPGKGLEWVALISSGGSYTYYTDSVKGRFIISRDNSRNSLYLQKNRRRAEDMAVYYCSRHGGNFFDYWGQGTTVTVSS

SEQ ID NO: 3269 - protein, 117 aa, synthetic construct
EVQLVESGGGLVQPGGSLRLSCAVSGFTFRSYGMSWVHQAPGKGLEWVALISSGGSYTYYTDSVKGRFIISRDNSRNTLYLQTNSLRAEDTAVYYCSRHGGNFFDYWGQGTTVTVSS

SEQ ID NO: 3270 - protein, 117 aa, synthetic construct
EVHLVESGGGLVQPGGALRLSCAVSGFTFRSYGMSWVRQATGKGLEWVALISSGGSYTYYTDSVKGRFTISRENAKNSLYLQMNSLRAGDTAVYYCSRHGGNFFDYWGQGTTVTVSS

SEQ ID NO: 3271 - protein, 117 aa, synthetic construct
EVQLVESGGGLVQPRGSLRLSCAVSGFTFRSYGMSWVRQAPGKGLEWVALISSGGSYTYYTDSVKGRFTISRDNSKNTLYLQMNNLRAEGTAVYYCSRHGGNFFDYWGQGTTVTVSS

SEQ ID NO: 3272 - protein, 117 aa, synthetic construct
EVQLVESGGGLVQPRGSLRLSCAVSGFTFRSYGMSWVRQAPGKGLEWVALISSGGSYTYYTDSVKGRFTISRDNSKNTLYLQMNNLRAEGTAAYYCSRHGGNFFDYWGQGTTVTVSS

SEQ ID NO: 3273 - protein, 117 aa, synthetic construct
QVQLVQSGAEVKKPGASVKVSCKVSGFTFRSYGMSWVRQAPGKGLEWVALISSGGSYTYYTDSVKGRFTITRDNSTNTLYMELSSLRSEDTAVYYCSRHGGNFFDYWGQGTTVTVSS

SEQ ID NO: 3274 - protein, 117 aa, synthetic construct
QVQLVQSGSELKKPGASVKVSCKVSGFTFRSYGMSWVRQAPGQGLEWVALISSGGSYTYYTDSVKGRFVISRDNSVNTLYLQISSLKAEDTAVYYCSRHGGNFFDYWGQGTTVTVSS

SEQ ID NO: 3275-3277 - skipped (3 entries)

SEQ ID NO: 3278 - protein, 469 aa, synthetic construct
METDTLLLWVLLLWVPGSTGQVQLVQSGAEVKKPGSSVKVSCKASGYSFTTYYIHWVRQAPGQGLEWMGWFFPGSGNIKYNEKFKGRVTITADTSTSTAYMELSSLRSEDTAVYYCAGSYYSYDVLDYWGQGTTVTVSSASTKGPSVFPLAPSSKSTSGGTAALGCLVKDYFPEPVTVSWNSGALTSGVHTFPAVLQSSGLYSLSSVVTVPSSSLGTQTYICNVNHKPSNTKVDKRVEPKSCDKTHTCPPCPAPELLGGPSVFLFPPKPKDTLMISRTPEVTCVVVDVSHEDPEVKFNWYVDGVEVHNAKTKPREEQYNSTYRVVSVLTVLHQDWLNGKEYKCKVSNKALPAPIEKTISKAKGQPREPQVYTLPPSREEMTKNQVSLTCLVKGFYPSDIAVEWESNGQPENNYKTTPPVLDSDGSFFLYSKLTVDKSRWQQGNVFSCSVMHEALHNHYTQKSLSLSPGK

SEQ ID NO: 3279 - protein, 234 aa, synthetic construct
METDTLLLWVLLLWVPGSTGDIQMTQSPSSLSASVGDRVTITCKASQNVGINVVWHQQKPGKVPKALIYSSSHRYSGVPSRFSGSGSGTDFTLTISSLQPEDVATYFCQQFKSYPLTFGQGTKLEIKRTVAAPSVFIFPPSDEQLKSGTASVVCLLNNFYPREAKVQWKVDNALQSGNSQESVTEQDSKDSTYSLSSTLTLSKADYEKHKVYACEVTHQGLSSPVTKSFNRGEC

SEQ ID NO: 3280 - protein, 247 aa, synthetic construct
METDTLLLWVLLLWVPGSTGDKTHTCPPCPAPELLGGPSVFLFPPKPKDTLMISRTPEVTCVVVDVSHEDPEVKFNWYVDGVEVHNAKTKPREEQYNSTYRVVSVLTVLHQDWLNGKEYKCKVSNKALPAPIEKTISKAKGQPREPQVYTLPPCREEMTKNQVSLWCLVKGFYPSDIAVEWESNGQPENNYKTTPPVLDSDGSFFLYSKLTVDKSRWQQGNVFSCSVMHEALHNRFTQKSLSLSPGK

SEQ ID NO: 3281 - protein, 520 aa, synthetic construct
METDTLLLWVLLLWVPGSTGEVQLVESGGGLVQPGGSLRLSCAASGFTFSNFGMHWVRQAPGKGLEWVSYISSGSSTIYYADTLKGRFTISRDNSKNTLYLQMNSLRAEDTAVYYCARRGEGAMDYWGQGTTVTVSSGGGGSGGGGSGGGGSGGGGSDNQLTQSPSFLSASVGDRVTITCRASSSVNYIYWYQQKPGKAPKLLIYYTSNLAPGVPSRFSGSGSGNEYTLTISSLQPEDFATYYCQQFTSSPFTFGQGTKLEIKGGGGSDKTHTCPPCPAPELLGGPSVFLFPPKPKDTLMISRTPEVTCVVVDVSHEDPEVKFNWYVDGVEVHNAKTKPREEQYNSTYRVVSVLTVLHQDWLNGKEYKCKVSNKALPAPIEKTISKAKGQPREPQVCTLPPSREEMTKNQVSLSCAVKGFYPSDIAVEWESNGQPENNYKTTPPVLDSDGSFFLVSKLTVDKSRWQQGNVFSCSVMHEALHNHYTQKSLSLSPGKGGGGSGGGGSGLNDIFEAQKIEWHE

SEQ ID NO: 3282-3283 - skipped (2 entries)

SEQ ID NO: 3284 - protein, 469 aa, synthetic construct
METDTLLLWVLLLWVPGSTGQVQLQQSGPELVKPGASVKISCKASGYAFSSSWMNWVKQRPGQGLEWIGRIYPGDGDTKYNGKFKGKATLTADKSSSTAYMHLSSLTSVDSAVYFCARRGTGGWYFDVWGAGTTVTVSSAKTTAPSVYPLAPVCGDTTGSSVTLGCLVKGYFPEPVTLTWNSGSLSSGVHTFPAVLQSDLYTLSSSVTVTSSTWPSQSITCNVAHPASSTKVDKKIEPRGPTIKPCPPCKCPAPNLLGGPSVFIFPPKIKDVLMISLSPIVTCVVVDVSEDDPDVQISWFVNNVEVHTAQTQTHREDYNSTLRVVSALPIQHQDWMSGKEFKCKVNNKDLPAPIERTISKPKGSVRAPQVYVLPPPEEEMTKKQVTLTCMVTDFMPEDIYVEWTNNGKTELNYKNTEPVLDSDGSYFMYSKLRVEKKNWVERNSYSCSVVHEGLHNHHTTKSFSRTPGK

SEQ ID NO: 3285 - protein, 238 aa, synthetic construct
METDTLLLWVLLLWVPGSTGDIVLTQSPASLAVSLGQRATISCRASESVDSSGNSFMHWYQQKPGQPPQLLIYRASNLESGIPARFSGSGSRTDFTLTINPVEADDVATFYCQQSFDDPFTFGSGTKLEIKRADAAPTVSIFPPSSEQLTSGGASVVCFLNNFYPKDINVKWKIDGSERQNGVLNSWTDQDSKDSTYSMSSTLTLTKDEYERHNSYTCEATHKTSTSPIVKSFNRNEC

SEQ ID NO: 3286-3288 - skipped (3 entries)

SEQ ID NO: 3289 - protein, 107 aa, synthetic construct; identical to SEQ ID NO: 230
  VARIANT 30: note = G, E, A or D
  VARIANT 32: note = R or K
  VARIANT 36: note = Y or H
  VARIANT 56: note = K or S

SEQ ID NO: 3290 - protein, 119 aa, synthetic construct; identical to SEQ ID NO: 231
  VARIANT 27: note = H, T, G or Y
  VARIANT 28: note = D, T or S
  VARIANT 30: note = H, R, D, K or T
  VARIANT 31: note = L, D, K, T or N
  VARIANT 32: note = W, F, T, I, Y or G
  VARIANT 50: note = R or W
  VARIANT 51: note = V, I or F
  VARIANT 52: note = F, S or Y
  VARIANT 53: note = A or P
  VARIANT 57: note = N or S
  VARIANT 58: note = T, V, Y or I
  VARIANT 59: note = K or R
  VARIANT 98: note = G or V
  VARIANT 100: note = Y or I
  VARIANT 103: note = Y or A
  VARIANT 104: note = D or G

SEQ ID NO: 3291-3307 - skipped (17 entries)

SEQ ID NO: 3308 - protein, 10 aa, synthetic construct
GGGGSGGGGS

SEQ ID NO: 3309 - protein, 15 aa, synthetic construct
GGGGSGGGGSGGGGS

SEQ ID NO: 3310-3437 - skipped (128 entries)

SEQ ID NO: 3438 - protein, 117 aa, synthetic construct
EVQLVESGGGLVQPGGSLRLSCAASGFTFSNFGMHWVRQAPGKGLEWVSYISSGSSTIYYADTLKGRFTISRDNAKNSLYLQMNSLRAEDTAVYYCARRGEGAMDYWGQGTTVTVSS

SEQ ID NO: 3439-3448 - skipped (10 entries)

SEQ ID NO: 3449 - protein, 101 aa, Homo sapiens
IAGITQAPTSQILAAGRRMTLRCTQDMRHNAMYWYRQDLGLGLRLIHYSNTAGTTGKGEVPDGYSVSRANTDDFPLTLASAVPSQTSVYFCASSWSFGTEA

SEQ ID NO: 3450 - protein, 100 aa, Homo sapiens
GVTQTPKFQVLKTGQSMTLQCAQDMNHEYMSWYRQDPGMGLRLIHYSVGAGITDQGEVPNGYNVSRSTTEDFPLRLLSAAPSQTSVYFCASSYVGNTGEL

SEQ ID NO: 3451 - protein, 100 aa, Homo sapiens
KVTQSSRYLVKRTGEKVFLECVQDMDHENMFWYRQDPGLGLRLIYFSYDVKMKEKGDIPEGYSVSREKKERFSLILASASTDQTSMYLCASSFLGTGVEQ

SEQ ID NO: 3452 - protein, 100 aa, Homo sapiens
GGITQSPKYLFRKEGQNVTLSCEQNLNHDAMYWYRQDPGQGLRLIYYSQIVNDFQKGDIAEGYSVSREKKESFPLTVTSAQKNPTAFYLCASSSRSSYEQ

SEQ ID NO: 3453 - protein, 101 aa, Homo sapiens
GVTQTPKHLITATGQRVTLRCSPRSGDLSVYWYQQSLDQGLQFLIQYYNGEERAKGNILERFSAQQFPDLHSELNLSSLELGDSALYFCASSVAGTPSYEQ

SEQ ID NO: 3454 - protein, 100 aa, Homo sapiens
AGVTQTPRYLIKTRGQQVTLSCSPISGHRSVSWYQQTPGQGLQFLFEYFSETQRNKGNFPGRFSGRQFSNSRSEMNVSTLELGDSALYLCASSFNMATGQ

SEQ ID NO: 3455 - protein, 106 aa, Homo sapiens
AVVSQHPSRVIVKSGTSVKIECRSLDFQATTMFWYRQFPKQSLMLMATSNEGSKATYEQGVEKDKFLINHASLTLSTLTVTSAHPEDSGFYICSALAGSGSSTDTQ

SEQ ID NO: 3456 - protein, 106 aa, Homo sapiens
MDAGVIQSPRHEVTEMGQQVTLRCKPISGHDYLFWYRQTMMRGLELLIYFNNNVPIDDSGMPEDRFSAKMPNASFSTLKIQPSEPRDSAVYFCASSLWEKLAKNIQ

SEQ ID NO: 3457 - protein, 94 aa, Homo sapiens
DTGITQTPKYLVTAMGSKRTMKREHLGHDSMYWYRQKAKKSLEFMFYYNCKEFIENKTVPNHFTPECPDSSRLYLHVVALQQEDSAAYLCTSSQ

SEQ ID NO: 3458 - protein, 96 aa, Homo sapiens
EPEVTQTPSHQVTQMGQEVILRCVPISNHLYFYWYRQILGQKVEFLVSFYNNEISEKSEIFDDQFSVERPDGSNFTLKIRSTKLEDSAMYFCASSE

SEQ ID NO: 3459 - protein, 95 aa, Homo sapiens
DTAVSQTPKYLVTQMGNDKSIKCEQNLGHDTMYWYKQDSKKFLKIMFSYNNKELIINETVPNRFSPKSPDKAHLNLHINSLELGDSAVYFCASSQ

SEQ ID NO: 3460 - protein, 95 aa, Homo sapiens
DTAVSQTPKYLVTQMGKKESLKXEQNLGHNAMYWYKQDSKKFLKTMFIYSNKEPILNETVPNRFSPDSPDKAHLNLHINSLELGDSAVYFCASSQ

SEQ ID NO: 3461 - protein, 95 aa, Homo sapiens
DTEVTQTPKHLVMGMTNKKSLKCEQHMGHRAMYWYKQKAKKPPELMFVYSYEKLSINESVPSRFSPECPNSSLLNLHLHALQPEDSALYLCASSQ

SEQ ID NO: 3462 - protein, 95 aa, Homo sapiens
ETGVTQTPRHLVMGMTNKKSLKCEQHLGHNAMYWYKQSAKKPLELMFVYNFKEQTENNSVPSRFSPECPNSSHLFLHLHTLQPEDSALYLCASSQ

SEQ ID NO: 3463 - protein, 95 aa, Homo sapiens
ETGVTQTPRHLVMGMTNKKSLKCEQHLGHNAMYWYKQSAKKPLELMFVYSLEERVENNSVPSRFSPECPNSSHLFLHLHTLQPEDSALYLCASSQ

SEQ ID NO: 3464 - protein, 95 aa, Homo sapiens
KAGVTQTPRYLIKTRGQQVTLSCSPISGHRSVSWYQQTPGQGLQFLFEYFSETQRNKGNFPGRFSGRQFSNSRSEMNVSTLELGDSALYLCASSL

SEQ ID NO: 3465 - protein, 95 aa, Homo sapiens
EAGVTQSPTHLIKTRGQQVTLRCSPISGHSSVSWYQQAPGQGPQFIFEYANELRRSEGNFPNRFSGRQFHDCCSEMNVSALELGDSALYLCARSL

SEQ ID NO: 3466 - protein, 95 aa, Homo sapiens
ETGVTQSPTHLIKTRGQQVTLRCSSQSGHNTVSWYQQALGQGPQFIFQYYREEENGRGNFPPRFSGLQFPNYSSELNVNALELDDSALYLCASSL

SEQ ID NO: 3467 - protein, 95 aa, Homo sapiens
DAGVTQSPTHLIKTRGQQVTLRCSPISGHKSVSWYQQVLGQGPQFIFQYYEKEERGRGNFPDRFSARQFPNYSSELNVNALLLGDSALYLCASSL

SEQ ID NO: 3468 - protein, 95 aa, Homo sapiens
DAGVTQSPTHLIKTRGQQVTLRCSPKSGHDTVSWYQQALGQGPQFIFQYYEEEERQRGNFPDRFSGHQFPNYSSELNVNALLLGDSALYLCASSL

SEQ ID NO: 3469 - protein, 95 aa, Homo sapiens
DAGVTQSPTHLIKTRGQHVTLRCSPISGHTSVSSYQQALGQGPQFIFQYYEKEERGRGNFPDQFSGHQFPNYSSELNVNALLLGDSALYLCASSL

SEQ ID NO: 3470 - protein, 95 aa, Homo sapiens
EAGVTQSPTHLIKTRGQQATLRCSPISGHTSVYWYQQALGLGLQFLLWYDEGEERNRGNFPPRFSGRQFPNYSSELNVNALELEDSALYLCASSL

SEQ ID NO: 3471 - protein, 95 aa, Homo sapiens
NAGVTQTPKFQVLKTGQSMTLQCAQDMNHNSMYWYRQDPGMGLRLIYYSASEGTTDKGEVPNGYNVSRLNKREFSLRLESAAPSQTSVYFCASSE

SEQ ID NO: 3472 - protein, 95 aa, Homo sapiens
NAGVTQTPKFRVLKTGQSMTLLCAQDMNHEYMYWYRQDPGMGLRLIHYSVGEGTTAKGEVPDGYNVSRLKKQNFLLGLESAAPSQTSVYFCASSY

SEQ ID NO: 3473 - protein, 95 aa, Homo sapiens; identical to SEQ ID NO: 3472

SEQ ID NO: 3474 - protein, 95 aa, Homo sapiens
IAGITQAPTSQILAAGRRMTLRCTQDMRHNAMYWYRQDLGLGLRLIHYSNTAGTTGKGEVPDGYSVSRANTDDFPLTLASAVPSQTSVYFCASSD

SEQ ID NO: 3475 - protein, 95 aa, Homo sapiens
NAGVTQTPKFQVLKTGQSMTLQCAQDMNHEYMSWYRQDPGMGLRLIHYSVGAGITDQGEVPNGYNVSRSTTEDFPLRLLSAAPSQTSVYFCASSY

SEQ ID NO: 3476 - protein, 95 aa, Homo sapiens
NAGVTQTPKFRILKIGQSMTLQCTQDMNHNYMYWYRQDPGMGLKLIYYSVGAGITDKGEVPNGYNVSRSTTEDFPLRLELAAPSQTSVYFCASSY

SEQ ID NO: 3477 - protein, 95 aa, Homo sapiens
NAGVTQTPKFHVLKTGQSMTLLCAQDMNHEYMYRYRQDPGKGLRLIYYSVAAALTDKGEVPNGYNVSRSNTEDFPLKLESAAPSQTSVYFCASSY

SEQ ID NO: 3478 - protein, 94 aa, Homo sapiens
NAGVTQTPKFHILKTGQSMTLQCAQDMNHGYMSWYRQDPGMGLRLIYYSAAAGTTDKEVPNGYNVSRLNTEDFPLRLVSAAPSQTSVYLCASSY

SEQ ID NO: 3479 - protein, 95 aa, Homo sapiens
NAGVTQTPKFHILKTGQSMTLQCAQDMNHGYLSWYRQDPGMGLRRIHYSVAAGITDKGEVPDGYNVSRSNTEDFPLRLESAAPSQTSVYFCASSY

SEQ ID NO: 3480 - protein, 96 aa, Homo sapiens
GAGVSQSLRHKVAKKGKDVALRYDPISGHNALYWYRQSLGQGLEFPIYFQGKDAADKSGLPRDRFSAQRSEGSISTLKFQRTQQGDLAVYLCASSS

SEQ ID NO: 3481 - protein, 96 aa, Homo sapiens
GAGVSQSPSNKVTEKGKDVELRCDPISGHTALYWYRQSLGQGLEFLIYFQGNSAPDKSGLPSDRFSAERTGGSVSTLTIQRTQQEDSAVYLCASSL

SEQ ID NO: 3482 - protein, 96 aa, Homo sapiens
GAGVSQTPSNKVTEKGKYVELRCDPISGHTALYWYRQSLGQGPEFLIYFQGTGAADDSGLPNDRFFAVRPEGSVSTLKIQRTERGDSAVYLCASSL

SEQ ID NO: 3483 - protein, 96 aa, Homo sapiens
GAGVSQSPRYKVAKRGRDVALRCDSISGHVTLYWYRQTLGQGSEVLTYSQSDAQRDKSGRPSGRFSAERPERSVSTLKIQRTEQGDSAVYLCASSL

SEQ ID NO: 3484 - protein, 96 aa, Homo sapiens
GAGVSQSPRYKVTKRGQDVALRCDPISGHVSLYWYRQALGQGPEFLTYFNYEAQQDKSGLPNDRFSAERPEGSISTLTIQRTEQRDSAMYRCASSL

SEQ ID NO: 3485 - protein, 96 aa, Homo sapiens
GAGVSQSPRYKVTKRGQDVTLRCDPISSHATLYWYQQALGQGPEFLTYFNYEAQPDKSGLPSDRFSAERPEGSISTLTIQRTEQRDSAMYRCASSL

SEQ ID NO: 3486 - protein, 96 aa, Homo sapiens
GAGVSQSPRYKVAKRGQDVALRCDPISGHVSLFWYQQALGQGPEFLTYFQNEAQLDKSGLPSDRFFAERPEGSVSTLKIQRTQQEDSAVYLCASSL

SEQ ID NO: 3487 - protein, 96 aa, Homo sapiens
DTGVSQNPRHKITKRGQNVTFRCDPISEHNRLYWYRQTLGQGPEFLTYFQNEAQLEKSRLLSDRFSAERPKGSFSTLEIQRTEQGDSAMYLCASSL

SEQ ID NO: 3488 - protein, 95 aa, Homo sapiens
DSGVTQTPKHLITATGQRVTLRCSPRSGDLSVYWYQQSLDQGLQFLIQYYNGEERAKGNILERFSAQQFPDLHSELNLSSLELGDSALYFCASSV

SEQ ID NO: 3489 - protein, 95 aa, Homo sapiens
DAEITQSPRHKITETGRQVTLACHQTWNHNNMFWYRQDLGHGLRLIHYSYGVQDTNKGEVSDGYSVSRSNTEDLPLTLESAASSQTSVYFCASSE

SEQ ID NO: 3490 - protein, 95 aa, Homo sapiens
DAGITQSPRYKITETGRQVTLMCHQTWSHSYMFWYRQDLGHGLRLIYYSAAADITDKGEVPDGYVVSRSKTENFPLTLESATRSQTSVYFCASSE

SEQ ID NO: 3491 - protein, 95 aa, Homo sapiens
DAGITQSPRHKVTETGTPVTLRCHQTENHRYMYWYRQDPGHGLRLIHYSYGVKDTDKGEVSDGYSVSRSKTEDFLLTLESATSSQTSVYFCAISE

SEQ ID NO: 3492 - protein, 96 aa, Homo sapiens
EAEVAQSPRYKITEKSQAVAFWCDPISGHATLYWYRQILGQGPELLVQFQDESVVDDSQLPKDRFSAERLKGVDSTLKIQPAELGDSAMYLCASSL

SEQ ID NO: 3493 - protein, 96 aa, Homo sapiens
EAGVAQSPRYKIIEKRQSVAFWCNPISGHATLYWYQQILGQGPKLLIQFQNNGVVDDSQLPKDRFSAERLKGVDSTLKIQPAKLEDSAVYLCASSL

SEQ ID NO: 3494 - protein, 96 aa, Homo sapiens
EAGVVQSPRYKIIEKKQPVAFWCNPISGHNTLYWYLQNLGQGPELLIRYENEEAVDDSQLPKDRFSAERLKGVDSTLKIQPAELGDSAVYLCASSL

SEQ ID NO: 3495 - protein, 96 aa, Homo sapiens
DAGVIQSPRHKVTEMGQSVTLRCEPISGHNDLLWYRQTFVQGLELLNYFCSWTLVDDSGVSKDXFSAQMPDVSFSTLRIQPMEPRDLGLYFCASSF

SEQ ID NO: 3496 - protein, 96 aa, Homo sapiens
DAGIIQSPKHEVTEMGQTVTLRCEPIFGHNFLFWYRDTFVQGLELLSYFRSXSIIDNAGMPTERFSAERPDGSFSTLKIQPAEQGDSAVYVCASRL

SEQ ID NO: 3497 - protein, 96 aa, Homo sapiens
DAGVIQSPRHEVTEMGQEVTLRCKPISGHNSLFWYRQTMMRGLELLIYFNNNVPIDDSGMPEDRFSAKMPNASFSTLKIQPSEPRDSAVYFCASSL

SEQ ID NO: 3498 - protein, 96 aa, Homo sapiens
DAGVIQSPRHEVTEMGQEVTLRCKPISGHDYLFWYRQTMMRGLELLIYFNNNVPIDDSGMPEDRFSAKMPNASFSTLKIQPSEPRDSAVYFCASSL

SEQ ID NO: 3499 - protein, 96 aa, Homo sapiens
DARVTQTPRHKVTEMGQEVTMRCQPILGHNTVFWYRQTMMQGLELLAYFRNRAPLDDSGMPKDRFSAEMPDATLATLKIQPSEPRDSAVYFCASGL

SEQ ID NO: 3500 - protein, 95 aa, Homo sapiens
AAGVIQSPRHLIKEKRETATLKCYPIPRHDTVYWYQQGPGQDPQFLISFYEKMQSDKGSIPDRFSAQQFSDYHSELNMSSLELGDSALYFCASSL

SEQ ID NO: 3501 - protein, 96 aa, Homo sapiens
EAGVTQFPSHSVIEKGQTVTLRCDPISGHDNLYWYRRVMGKEIKFLLHFVKESKQDESGMPNNRFLAERTGGTYSTLKVQPAELEDSGVYFCASSQ

SEQ ID NO: 3502 - protein, 95 aa, Homo sapiens
DAMVIQNPRYQVTQFGKPVTLSCSQTLNHNVMYWYQQKSSQAPKLLFHYYDKDFNNEADTPDNFQSRRPNTSFCFLDIRSPGLGDTAMYLCATSR

SEQ ID NO: 3503 - protein, 96 aa, Homo sapiens
GEEVAQTPKHLVRGEGQKAKLYCAPIKGHSYVFWYQQVLKNEFKFLISFQNENVFDETGMPKERFSAKCLPNSPCSLEIQATKLEDSAVYFCASSQ

SEQ ID NO: 3504 - protein, 95 aa, Homo sapiens
EPGVSQTPRHKVTNMGQEVILRCDPSSGHMFVHWYRQNLRQEMKLLISFQYQNIAVDSGMPKERFTAERPNGTSSTLKIHPAEPRDSAVYLYSSG

SEQ ID NO: 3505 - protein, 96 aa, Homo sapiens
NAGVMQNPRHLVRRRGQEARLRCSPMKGHSHVYWYRQLPEEGLKFMVYLQKENIIDESGMPKERFSAEFPKEGPSILRIQQVVRGDSAAYFCASSP

SEQ ID NO: 3506 - protein, 95 aa, Homo sapiens
DGGITQSPKYLFRKEGQNVTLSCEQNLNHDAMYWYRQDPGQGLRLIYYSQIVNDFQKGDIAEGYSVSREKKESFPLTVTSAQKNPTAFYLCASSI

SEQ ID NO: 3507 - protein, 97 aa, Homo sapiens
GAVVSQHPSWVICKSGTSVKIECRSLDFQATTMFWYRQFPKQSLMLMATSNEGSKATYEQGVEKDKFLINHASLTLSTLTVTSAHPEDSSFYICSAR

SEQ ID NO: 3508 - protein, 96 aa, Homo sapiens
DTKVTQRPRLLVKASEQKAKMDCVPIKAHSYVYWYRKKLEEELKFLVYFQNEELIQKAEIINERFLAQCSKNSSCTLEIQSTESGDTALYFCASSK

SEQ ID NO: 3509 - protein, 96 aa, Homo sapiens
HAKVTQTPGHLVKGKGQKTKMDCTPEKGHTFVYWYQQNQNKEFMLLISFQNEQVLQETEMHKKRFSSQCPKNAPCSLAILSSEPGDTALYLCASSQ

SEQ ID NO: 3510 - protein, 96 aa, Homo sapiens
DADVTQTPRNRITKTGKRIMLECSQTKGHDRMYWYRQDPGLGLRLIYYSFDVKDINKGEISDGYSVSRQAQAKFSLSLESAIPNQTALYFCATSDL

SEQ ID NO: 3511 - protein, 95 aa, Homo sapiens
EADIYQTPRYLVIGTGKKITLECSQTMGHDKMYWYQQDPGMELHLIHYSYGVNSTEKGDLSSESTVSRIRTEHFPLTLESARPSHTSQYLCASSE

SEQ ID NO: 3512 - protein, 95 aa, Homo sapiens
DAVVTQFPRHRIIGTGKEFILQCSQNMNHVTMYWYRQDPGLGLKLVYYSPGTGSTEKGDISEGYHVSXNTIASFPLTLKSASTNQTSVYLYASSS

SEQ ID NO: 3513 - protein, 95 aa, Homo sapiens
EAQVTQNPRYLITVTGKKLTVTCSQNMNHEYMSWYRQDPGLGLRQIYYSMNVEVTDKGDVPEGYKVSRKEKRNFPLILESPSPNQTSLYFCASSL

SEQ ID NO: 3514 - protein, 95 aa, Homo sapiens
DVKVTQSSRYLVKRTGEKVFLECVQDMDHENMFWYRQDPGLGLRLIYFSYDVKMKEKGDIPEGYSVSREKKERFSLILESASTNQTSMYLCASSL

SEQ ID NO: 3515 - protein, 96 aa, Homo sapiens
SAVISQKPSRDICQRGTSLTIQCQVDSQVTMMFWYRQQPGQSLTLIATANQGSEATYESGFVIDKFPISRPNLTFSTLTVSNMSPEDSSIYLCSVE

SEQ ID NO: 3516 - protein, 94 aa, Homo sapiens
SQTIHQWPATLVQPVGSPLSLECTVEGTSNPNLYWYRQAAGRGLQLLFYSVGIGQISSEVPQNLSASRPQDRQFILSSKKLLLSDSGFYLCAWS

SEQ ID NO: 3517 - protein, 449 aa, synthetic construct
QVQLVQSGAEVKKPGSSVKVSCKASGHDFRLTYIHWVRQAPGQGLEWMGRVSAGSGNVKYNEKFKGRVTITADTSTSTAYMELSSLRSEDTAVYYCAVSYYSYDVLDYWGQGTTVTVSSASTKGPSVFPLAPSSKSTSGGTAALGCLVKDYFPEPVTVSWNSGALTSGVHTFPAVLQSSGLYSLSSVVTVPSSSLGTQTYICNVNHKPSNTKVDKRVEPKSCDKTHTCPPCPAPELLGGPSVFLFPPKPKDTLMISRTPEVTCVVVDVSHEDPEVKFNWYVDGVEVHNAKTKPREEQYASTYRVVSVLTVLHQDWLNGKEYKCKVSNKALPAPIEKTISKAKGQPREPQVCTLPPSREEMTKNQVSLSCAVKGFYPSDIAVEWESNGQPENNYKTTPPVLDSDGSFFLVSKLTVDKSRWQQGNVFSCSVMHEALHNHYTQKSLSLSPGK

SEQ ID NO: 3518 - protein, 214 aa, synthetic construct
DIQMTQSPSFLSASVGDRVTITCKASQNVADRVVWHQQKPGKAPKALIYSSSHRYKGVPSRFSGSGSGTEFTLTISSLQPEDFATYFCQQFKSYPLTFGQGTKLEIKRTVAAPSVFIFPPSDEQLKSGTASVVCLLNNFYPREAKVQWKVDNALQSGNSQESVTEQDSKDSTYSLSSTLTLSKADYEKHKVYACEVTHQGLSSPVTKSFNRGEC

SEQ ID NO: 3519-3520 - skipped (2 entries)

SEQ ID NO: 3521 - protein, 370 aa, synthetic construct
APTSSSTKKTQLQLEHLLLDLQMILNGINNYKNPKLTRMLTFKFYMPKKATELKHLQCLEEELKPLEEVLNLAQSKNFHLRPRDLISNINVIVLELKGSETTFMCEYADETATIVEFLNRWITFAQSIISTLTGGGGSGGGGSDKTHTCPPCPAPELLGGPSVFLFPPKPKDTLMISRTPEVTCVVVDVSHEDPEVKFNWYVDGVEVHNAKTKPREEQYASTYRVVSVLTVLHQDWLNGKEYKCKVSNKALPAPIEKTISKAKGQPREPQVYTLPPCREEMTKNQVSLWCLVKGFYPSDIAVEWESNGQPENNYKTTPPVLDSDGSFFLYSKLTVDKSRWQQGNVFSCSVMHEALHNHYTQKSLSLSPGK

SEQ ID NO: 3522-3525 - skipped (4 entries)

SEQ ID NO: 3526 - protein, 220 aa, synthetic construct
DIVMSQSPSSLAVSVGEKVTMSCKSSQSLLYSGNQKNYLAWYQQKPGQSPKLLIYWASTRESGVPDRFTGSGSGTDFTLTINSVKAEDLTVYYCQQYYGYPRTFGGGTKVEIKRADAAPTVSIFPPSSEQLTSGGASVVCFLNNFYPKDINVKWKIDGSERQNGVLNSWTDQDSKDSTYSMSSTLTLTKDEYERHNSYTCEATHKTSTSPIVKSFNRNEC

SEQ ID NO: 3527 - protein, 113 aa, synthetic construct
DIVMSQSPSSLAVSVGEKVTMSCKSSQSLLYSGNQKNYLAWYQQKPGQSPKLLIYWASTRESGVPDRFTGSGSGTDFTLTINSVKAEDLTVYYCQQYYGYPRTFGGGTKVEIK

SEQ ID NO: 3528 - protein, 107 aa, synthetic construct
RADAAPTVSIFPPSSEQLTSGGASVVCFLNNFYPKDINVKWKIDGSERQNGVLNSWTDQDSKDSTYSMSSTLTLTKDEYERHNSYTCEATHKTSTSPIVKSFNRNEC

SEQ ID NO: 3529 - protein, 452 aa, synthetic construct
QVQLQQSGTELMKPGASVKISCKASGYTFSNYWIEWIKQRPGHGLEWVGEILPGAGPTNYNEKFKGKATFTADSSSNTAYMQLSSLTSEDSAVYYCARTDYDYDWFAYWGQGTLVTVSAAKTTAPSVYPLAPVSGDTTGSSVTLGCLVKGYFPEPVTLTWNSGSLSSGVHTFPAVLQSDLYTLSSSVTVTSSTWPSQSITCNVAHPASSTKVDKKIEPKSCDKTHTCPPCPAPNAAGGPSVFIFPPKIKDVLMISLSPIVTCVVVDVSEDDPDVQISWFVNNVEVHTAQTQTHREDYNSTLRVVSALPIQHQDWMSGKEFKCKVNNKDLGAPIERTISKPKGSVRAPQVCVLPPPEEEMTKKQVTLSCAVTDFMPEDIYVEWTNNGKTELNYKNTEPVLDSDGSYFMVSKLRVEKKNWVERNSYSCSVVHEGLHNHHTTKSFSRTPGKEPEA

SEQ ID NO: 3530 - protein, 192 aa, synthetic construct
QVQLQQSGTELMKPGASVKISCKASGYTFSNYWIEWIKQRPGHGLEWVGEILPGAGPTNYNEKFKGKATFTADSSSNTAYMQLSSLTSEDSAVYYCARTDYDYDWFAYWGQGTLVTVSAAKTTAPSVYPLAPVSGDTTGSSVTLGCLVKGYFPEPVTLTWNSGSLSSGVHTFPAVLQSDLYTLSSSVTVTSS

SEQ ID NO: 3531 - protein, 256 aa, synthetic construct
TWPSQSITCNVAHPASSTKVDKKIEPKSCDKTHTCPPCPAPNAAGGPSVFIFPPKIKDVLMISLSPIVTCVVVDVSEDDPDVQISWFVNNVEVHTAQTQTHREDYNSTLRVVSALPIQHQDWMSGKEFKCKVNNKDLGAPIERTISKPKGSVRAPQVCVLPPPEEEMTKKQVTLSCAVTDFMPEDIYVEWTNNGKTELNYKNTEPVLDSDGSYFMVSKLRVEKKNWVERNSYSCSVVHEGLHNHHTTKSFSRTPGK

SEQ ID NO: 3532 - protein, 383 aa, synthetic construct
APTSSSTKKTQLQLEHLLLDLQMILNGINNYKNPKLTRMLTFKFYMPKKATELKHLQCLEEELKPLEEVLNLAQSKNFHLRPRDLISNINVIVLELKGSETTFMCEYADETATIVEFLNRWITFCQSIISTLTGGGGSGGGGSDKTHTCPPCPAPNAAGGPSVFIFPPKIKDVLMISLSPIVTCVVVDVSEDDPDVQISWFVNNVEVHTAQTQTHREDYNSTLRVVSALPIQHQDWMSGKEFKCKVNNKDLGAPIERTISKPKGSVRAPQVYVLPPCEEEMTKKQVTLWCMVTDFMPEDIYVEWTNNGKTELNYKNTEPVLDSDGSYFMYSKLRVEKKNWVERNSYSCSVVHEGLHNHHTTKSFSRTPGKGGGGSHHHHHHHH

SEQ ID NO: 3533 - protein, 227 aa, synthetic construct
DKTHTCPPCPAPNAAGGPSVFIFPPKIKDVLMISLSPIVTCVVVDVSEDDPDVQISWFVNNVEVHTAQTQTHREDYNSTLRVVSALPIQHQDWMSGKEFKCKVNNKDLGAPIERTISKPKGSVRAPQVYVLPPCEEEMTKKQVTLWCMVTDFMPEDIYVEWTNNGKTELNYKNTEPVLDSDGSYFMYSKLRVEKKNWVERNSYSCSVVHEGLHNHHTTKSFSRTPGK

SEQ ID NO: 3534 - protein, 13 aa, synthetic construct
GGGGSHHHHHHHH

SEQ ID NO: 3535 - protein, 368 aa, synthetic construct
DIVMSQSPSSLAVSVGEKVTMSCKSSQSLLYSGNQKNYLAWYQQKPGQSPKLLIYWASTRESGVPDRFTGSGSGTDFTLTINSVKAEDLTVYYCQQYYGYPRTFGGGTKVEIKRADAAPTVSIFPPSSEQLTSGGASVVCFLNNFYPKDINVKWKIDGSERQNGVLNSWTDQDSKDSTYSMSSTLTLTKDEYERHNSYTCEATHKTSTSPIVKSFNRNECGGGGSGGGGSGGGGSAPTSSSTKKTQLQLEHLLLDLQMILNGINNYKNPKLTRMLTFKFYMPKKATELKHLQCLEEELKPLEEVLNLAQSKNFHLRPRDLISNINVIVLELKGSETTFMCEYADETATIVEFLNRWITFCQSIISTLT

SEQ ID NO: 3536 - protein, 452 aa, synthetic construct
QVQLQQSGTELMKPGASVKISCKASGYTFSNYWIEWIKQRPGHGLEWVGEILPGAGPTNYNEKFKGKATFTADSSSNTAYMQLSSLTSEDSAVYYCARTDYDYDWFAYWGQGTLVTVSAAKTTAPSVYPLAPVSGDTTGSSVTLGCLVKGYFPEPVTLTWNSGSLSSGVHTFPAVLQSDLYTLSSSVTVTSSTWPSQSITCNVAHPASSTKVDKKIEPKSCDKTHTCPPCPAPNAAGGPSVFIFPPKIKDVLMISLSPIVTCVVVDVSEDDPDVQISWFVNNVEVHTAQTQTHREDYNSTLRVVSALPIQHQDWMSGKEFKCKVNNKDLGAPIERTISKPKGSVRAPQVYVLPPPEEEMTKKQVTLTCMVTDFMPEDIYVEWTNNGKTELNYKNTEPVLDSDGSYFMYSKLRVEKKNWVERNSYSCSVVHEGLHNHHTTKSFSRTPGKEPEA

SEQ ID NO: 3537 - protein, 260 aa, synthetic construct
TWPSQSITCNVAHPASSTKVDKKIEPKSCDKTHTCPPCPAPNAAGGPSVFIFPPKIKDVLMISLSPIVTCVVVDVSEDDPDVQISWFVNNVEVHTAQTQTHREDYNSTLRVVSALPIQHQDWMSGKEFKCKVNNKDLGAPIERTISKPKGSVRAPQVYVLPPPEEEMTKKQVTLTCMVTDFMPEDIYVEWTNNGKTELNYKNTEPVLDSDGSYFMYSKLRVEKKNWVERNSYSCSVVHEGLHNHHTTKSFSRTPGKEPEA

SEQ ID NO: 3538-3546 - skipped (9 entries)

SEQ ID NO: 3547 - protein, 4 aa, synthetic construct
EPEA

SEQ ID NO: 3548 - protein, 448 aa, synthetic construct
QVQLQQSGTELMKPGASVKISCKASGYTFSNYWIEWIKQRPGHGLEWVGEILPGAGPTNYNEKFKGKATFTADSSSNTAYMQLSSLTSEDSAVYYCARTDYDYDWFAYWGQGTLVTVSAAKTTAPSVYPLAPVSGDTTGSSVTLGCLVKGYFPEPVTLTWNSGSLSSGVHTFPAVLQSDLYTLSSSVTVTSSTWPSQSITCNVAHPASSTKVDKKIEPKSCDKTHTCPPCPAPNAAGGPSVFIFPPKIKDVLMISLSPIVTCVVVDVSEDDPDVQISWFVNNVEVHTAQTQTHREDYNSTLRVVSALPIQHQDWMSGKEFKCKVNNKDLGAPIERTISKPKGSVRAPQVCVLPPPEEEMTKKQVTLSCAVTDFMPEDIYVEWTNNGKTELNYKNTEPVLDSDGSYFMVSKLRVEKKNWVERNSYSCSVVHEGLHNHHTTKSFSRTPGK

SEQ ID NO: 3549 - protein, 370 aa, synthetic construct
APTSSSTKKTQLQLEHLLLDLQMILNGINNYKNPKLTRMLTFKFYMPKKATELKHLQCLEEELKPLEEVLNLAQSKNFHLRPRDLISNINVIVLELKGSETTFMCEYADETATIVEFLNRWITFCQSIISTLTGGGGSGGGGSDKTHTCPPCPAPNAAGGPSVFIFPPKIKDVLMISLSPIVTCVVVDVSEDDPDVQISWFVNNVEVHTAQTQTHREDYNSTLRVVSALPIQHQDWMSGKEFKCKVNNKDLGAPIERTISKPKGSVRAPQVYVLPPCEEEMTKKQVTLWCMVTDFMPEDIYVEWTNNGKTELNYKNTEPVLDSDGSYFMYSKLRVEKKNWVERNSYSCSVVHEGLHNHHTTKSFSRTPGK

SEQ ID NO: 3550-3639 - skipped (90 entries)

SEQ ID NO: 3640 - protein, 10 aa, synthetic construct
GFNIKSAYMH

SEQ ID NO: 3641 - protein, 11 aa, synthetic construct
SESVDSYGNSF

SEQ ID NO: 3642 - protein, 243 aa, synthetic construct
EVQLVESGGGLVQPGGSLRLSCAASGFTFSNFGMHWVRQAPGKGLEWVSYISSGSSTIYYADTLKGRFTISRDNSKNTLYLQMNSLRAEDTAVYYCARRGEGAMDYWGQGTTVTVSSGGGGSGGGGSGGGGSGGGGSDNQLTQSPSFLSASVGDRVTITCRASSSVNYIYWYQQKPGKAPKLLIYYTSNLAPGVPSRFSGSGSGNEYTLTISSLQPEDFATYYCQQFTSSPFTFGQGTKLEIK

SEQ ID NO: 3643 - skipped

SEQ ID NO: 3644 - protein, 107 aa, synthetic construct [sequence omitted]

SEQ ID NO: 3645 - protein, 330 aa, synthetic construct
ASTKGPSVFPLAPSSKSTSGGTAALGCLVKDYFPEPVTVSWNSGALTSGVHTFPAVLQSSGLYSLSSVVTVPSSSLGTQTYICNVNHKPSNTKVDKKVEPKSCDKTHTCPPCPAPELLGGPSVFLFPPKPKDTLMISRTPEVTCVVVDVSHEDPEVKFNWYVDGVEVHNAKTKPREEQYASTYRVVSVLTVLHQDWLNGKEYKCKVSNKALPAPIEKTISKAKGQPREPQVYTLPPSREEMTKNQVSLTCLVKGFYPSDIAVEWESNGQPENNYKTTPPVLDSDGSFFLYSKLTVDKSRWQQGNVFSCSVMHEALHNHYTQKSLSLSPGK

SEQ ID NO: 3646 - protein, 334 aa, synthetic construct
ASTKGPSVFPLAPSSKSTSGGTAALGCLVKDYFPEPVTVSWNSGALTSGVHTFPAVLQSSGLYSLSSVVTVPSSSLGTQTYICNVNHKPSNTKVDKKVEPKSCDKTHTCPPCPAPELLGGPSVFLFPPKPKDTLMISRTPEVTCVVVDVSHEDPEVKFNWYVDGVEVHNAKTKPREEQYASTYRVVSVLTVLHQDWLNGKEYKCKVSNKALPAPIEKTISKAKGQPREPQVYTLPPSREEMTKNQVSLTCLVKGFYPSDIAVEWESNGQPENNYKTTPPVLDSDGSFFLYSKLTVDKSRWQQGNVFSCSVMHEALHNHYTQKSLSLSPGKEPEA

SEQ ID NO: 3647 - protein, 330 aa, synthetic construct; identical to SEQ ID NO: 41

SEQ ID NO: 3648 - protein, 227 aa, synthetic construct
DKTHTCPPCPAPELLGGPSVFLFPPKPKDTLMISRTPEVTCVVVDVSHEDPEVKFNWYVDGVEVHNAKTKPREEQYASTYRVVSVLTVLHQDWLNGKEYKCKVSNKALPAPIEKTISKAKGQPREPQVYTLPPCREEMTKNQVSLWCLVKGFYPSDIAVEWESNGQPENNYKTTPPVLDSDGSFFLYSKLTVDKSRWQQGNVFSCSVMHEALHNHYTQKSLSLSPGK

SEQ ID NO: 3649 - protein, 330 aa, synthetic construct
ASTKGPSVFPLAPSSKSTSGGTAALGCLVKDYFPEPVTVSWNSGALTSGVHTFPAVLQSSGLYSLSSVVTVPSSSLGTQTYICNVNHKPSNTKVDKRVEPKSCDKTHTCPPCPAPELLGGPSVFLFPPKPKDTLMISRTPEVTCVVVDVSHEDPEVKFNWYVDGVEVHNAKTKPREEQYASTYRVVSVLTVLHQDWLNGKEYKCKVSNKALPAPIEKTISKAKGQPREPQVCTLPPSREEMTKNQVSLSCAVKGFYPSDIAVEWESNGQPENNYKTTPPVLDSDGSFFLVSKLTVDKSRWQQGNVFSCSVMHEALHNHYTQKSLSLSPGK

SEQ ID NO: 3650 - protein, 10 aa, synthetic construct
GHDFRLTYIH

SEQ ID NO: 3651 - protein, 17 aa, synthetic construct
RVSAGSGNVKYNEKFKG

SEQ ID NO: 3652 - protein, 11 aa, synthetic construct
KASQNVGNRVV

SEQ ID NO: 3653 - protein, 7 aa, synthetic construct
SSSHRYK

SEQ ID NO: 3654 - protein, 17 aa, synthetic construct
RIYAGSGNVKYNEKFKG

SEQ ID NO: 3655 - protein, 11 aa, synthetic construct
KASQNVADRVV

SEQ ID NO: 3656 - protein, 10 aa, synthetic construct
GHDFKLTYIH

SEQ ID NO: 3657 - protein, 17 aa, synthetic construct
RVSAGSGNTKYNEKFKG

SEQ ID NO: 3658 - protein, 11 aa, synthetic construct
KASQNVGDRVA

SEQ ID NO: 3659 - protein, 17 aa, synthetic construct
RVYAGSGNTKYNEKFKG

SEQ ID NO: 3660 - protein, 11 aa, synthetic construct
KASQNVEDRVV

SEQ ID NO: 3661 - protein, 17 aa, synthetic construct
RISAGSGNTKYNEKFKG

SEQ ID NO: 3662 - protein, 11 aa, synthetic construct
KASQNVGDRVV

SEQ ID NO: 3663 - protein, 17 aa, synthetic construct
RIYAGSGNTKYNEKFKG

SEQ ID NO: 3664 - protein, 9 aa, synthetic construct
LQHNSYPLT

SEQ ID NO: 3665 - protein, 17 aa, synthetic construct
RVSAGSGNVNYAQKFQG

SEQ ID NO: 3666 - protein, 11 aa, synthetic construct
RASQNVDNRLG

SEQ ID NO: 3667 - protein, 11 aa, synthetic construct
KASQNVDNRVA

SEQ ID NO: 3668 - protein, 7 aa, synthetic construct
AASSLQK

SEQ ID NO: 3669-3999 - skipped (331 entries)

SEQ ID NO: 4000 - protein, 447 aa, synthetic construct
QVQLVQSGAEVKKPGSSVKVSCKASGHDFRLTYIHWVRQAPGQGLEWMGRVSAGSGNVKYNEKFKGRVTITADTSTSTAYMELSSLRSEDTAVYYCAVSYYSYDVLDYWGQGTTVTVSSASTKGPSVFPLAPSSKSTSGGTAALGCLVKDYFPEPVTVSWNSGALTSGVHTFPAVLQSSGLYSLSSVVTVPSSSLGTQTYICNVNHKPSNTKVDKRVEPKSCDKTHTCPPCPAPELLGGPSVFLFPPKPKDTLMISRTPEVTCVVVDVSHEDPEVKFNWYVDGVEVHNAKTKPREEQYASTYRVVSVLTVLHQDWLNGKEYKCKVSNKALPAPIEKTISKAKGQPREPQVCTLPPSREEMTKNQVSLSCAVKGFYPSDIAVEWESNGQPENNYKTTPPVLDSDGSFFLVSKLTVDKSRWQQGNVFSCSVMHEALHNHYTQKSLSLSP

SEQ ID NO: 4001 - protein, 328 aa, synthetic construct
ASTKGPSVFPLAPSSKSTSGGTAALGCLVKDYFPEPVTVSWNSGALTSGVHTFPAVLQSSGLYSLSSVVTVPSSSLGTQTYICNVNHKPSNTKVDKRVEPKSCDKTHTCPPCPAPELLGGPSVFLFPPKPKDTLMISRTPEVTCVVVDVSHEDPEVKFNWYVDGVEVHNAKTKPREEQYASTYRVVSVLTVLHQDWLNGKEYKCKVSNKALPAPIEKTISKAKGQPREPQVCTLPPSREEMTKNQVSLSCAVKGFYPSDIAVEWESNGQPENNYKTTPPVLDSDGSFFLVSKLTVDKSRWQQGNVFSCSVMHEALHNHYTQKSLSLSP

SEQ ID NO: 4002 - protein, 368 aa, synthetic construct
APTSSSTKKTQLQLEHLLLDLQMILNGINNYKNPKLTRMLTFKFYMPKKATELKHLQCLEEELKPLEEVLNLAQSKNFHLRPRDLISNINVIVLELKGSETTFMCEYADETATIVEFLNRWITFAQSIISTLTGGGGSGGGGSDKTHTCPPCPAPELLGGPSVFLFPPKPKDTLMISRTPEVTCVVVDVSHEDPEVKFNWYVDGVEVHNAKTKPREEQYASTYRVVSVLTVLHQDWLNGKEYKCKVSNKALPAPIEKTISKAKGQPREPQVYTLPPCREEMTKNQVSLWCLVKGFYPSDIAVEWESNGQPENNYKTTPPVLDSDGSFFLYSKLTVDKSRWQQGNVFSCSVMHEALHNHYTQKSLSLSP

SEQ ID NO: 4003 - protein, 225 aa, synthetic construct
DKTHTCPPCPAPELLGGPSVFLFPPKPKDTLMISRTPEVTCVVVDVSHEDPEVKFNWYVDGVEVHNAKTKPREEQYASTYRVVSVLTVLHQDWLNGKEYKCKVSNKALPAPIEKTISKAKGQPREPQVYTLPPCREEMTKNQVSLWCLVKGFYPSDIAVEWESNGQPENNYKTTPPVLDSDGSFFLYSKLTVDKSRWQQGNVFSCSVMHEALHNHYTQKSLSLSP

SEQ ID NO: 4004 - protein, 449 aa, synthetic construct
QVQLVQSGAEVKKPGSSVKVSCKASGYSFTTYYIHWVRQAPGQGLEWMGWFFPGSGNIKYNEKFKGRVTITADTSTSTAYMELSSLRSEDTAVYYCAGSYYSYDVLDYWGQGTTVTVSSASTKGPSVFPLAPSSKSTSGGTAALGCLVKDYFPEPVTVSWNSGALTSGVHTFPAVLQSSGLYSLSSVVTVPSSSLGTQTYICNVNHKPSNTKVDKRVEPKSCDKTHTCPPCPAPELLGGPSVFLFPPKPKDTLMISRTPEVTCVVVDVSHEDPEVKFNWYVDGVEVHNAKTKPREEQYASTYRVVSVLTVLHQDWLNGKEYKCKVSNKALPAPIEKTISKAKGQPREPQVCTLPPSREEMTKNQVSLSCAVKGFYPSDIAVEWESNGQPENNYKTTPPVLDSDGSFFLVSKLTVDKSRWQQGNVFSCSVMHEALHNHYTQKSLSLSPGK

SEQ ID NO: 4005 - protein, 214 aa, synthetic construct
DIQMTQSPSSLSASVGDRVTITCKASQNVGINVVWHQQKPGKVPKALIYSSSHRYSGVPSRFSGSGSGTDFTLTISSLQPEDVATYFCQQFKSYPLTFGQGTKLEIKRTVAAPSVFIFPPSDEQLKSGTASVVCLLNNFYPREAKVQWKVDNALQSGNSQESVTEQDSKDSTYSLSSTLTLSKADYEKHKVYACEVTHQGLSSPVTKSFNRGEC

SEQ ID NO: 4006 - protein, 447 aa, synthetic construct
QVQLVQSGAEVKKPGSSVKVSCKASGYSFTTYYIHWVRQAPGQGLEWMGWFFPGSGNIKYNEKFKGRVTITADTSTSTAYMELSSLRSEDTAVYYCAGSYYSYDVLDYWGQGTTVTVSSASTKGPSVFPLAPSSKSTSGGTAALGCLVKDYFPEPVTVSWNSGALTSGVHTFPAVLQSSGLYSLSSVVTVPSSSLGTQTYICNVNHKPSNTKVDKRVEPKSCDKTHTCPPCPAPELLGGPSVFLFPPKPKDTLMISRTPEVTCVVVDVSHEDPEVKFNWYVDGVEVHNAKTKPREEQYASTYRVVSVLTVLHQDWLNGKEYKCKVSNKALPAPIEKTISKAKGQPREPQVCTLPPSREEMTKNQVSLSCAVKGFYPSDIAVEWESNGQPENNYKTTPPVLDSDGSFFLVSKLTVDKSRWQQGNVFSCSVMHEALHNHYTQKSLSLSP

SEQ ID NO: 4007 - protein, 368 aa, synthetic construct
APASSSTKKTQLQLEHLLLDLQMILNGINNYKNPKLTRMLTAKFAMPKKATELKHLQCLEEELKPLEEVLNGAQSKNFHLRPRDLISNINVIVLELKGSETTFMCEYADETATIVEFLNRWITFAQSIISTLTGGGGSGGGGSDKTHTCPPCPAPELLGGPSVFLFPPKPKDTLMISRTPEVTCVVVDVSHEDPEVKFNWYVDGVEVHNAKTKPREEQYASTYRVVSVLTVLHQDWLNGKEYKCKVSNKALPAPIEKTISKAKGQPREPQVYTLPPCREEMTKNQVSLWCLVKGFYPSDIAVEWESNGQPENNYKTTPPVLDSDGSFFLYSKLTVDKSRWQQGNVFSCSVMHEALHNHYTQKSLSLSP

SEQ ID NO: 4008 - protein, 449 aa, synthetic construct
QVQLVQSGAEVKKPGSSVKVSCKASGTDFDKIYIHWVRQAPGQGLEWMGRVSAGSGNTKYNEKFKGRVTITADTSTSTAYMELSSLRSEDTAVYYCAGSYYSYDVLDYWGQGTTVTVSSASTKGPSVFPLAPSSKSTSGGTAALGCLVKDYFPEPVTVSWNSGALTSGVHTFPAVLQSSGLYSLSSVVTVPSSSLGTQTYICNVNHKPSNTKVDKRVEPKSCDKTHTCPPCPAPELLGGPSVFLFPPKPKDTLMISRTPEVTCVVVDVSHEDPEVKFNWYVDGVEVHNAKTKPREEQYASTYRVVSVLTVLHQDWLNGKEYKCKVSNKALPAPIEKTISKAKGQPREPQVCTLPPSREEMTKNQVSLSCAVKGFYPSDIAVEWESNGQPENNYKTTPPVLDSDGSFFLVSKLTVDKSRWQQGNVFSCSVMHEALHNHYTQKSLSLSPGK

SEQ ID NO: 4009 - protein, 214 aa, synthetic construct
DIQMTQSPSFLSASVGDRVTITCKASQNVGNRVAWYQQKPGKAPKALIYSSSHRYKGVPSRFSGSGSGTEFTLTISSLQPEDFATYFCQQFKSYPLTFGQGTKLEIKRTVAAPSVFIFPPSDEQLKSGTASVVCLLNNFYPREAKVQWKVDNALQSGNSQESVTEQDSKDSTYSLSSTLTLSKADYEKHKVYACEVTHQGLSSPVTKSFNRGEC

SEQ ID NO: 4010 - protein, 447 aa, synthetic construct
QVQLVQSGAEVKKPGSSVKVSCKASGTDFDKIYIHWVRQAPGQGLEWMGRVSAGSGNTKYNEKFKGRVTITADTSTSTAYMELSSLRSEDTAVYYCAGSYYSYDVLDYWGQGTTVTVSSASTKGPSVFPLAPSSKSTSGGTAALGCLVKDYFPEPVTVSWNSGALTSGVHTFPAVLQSSGLYSLSSVVTVPSSSLGTQTYICNVNHKPSNTKVDKRVEPKSCDKTHTCPPCPAPELLGGPSVFLFPPKPKDTLMISRTPEVTCVVVDVSHEDPEVKFNWYVDGVEVHNAKTKPREEQYASTYRVVSVLTVLHQDWLNGKEYKCKVSNKALPAPIEKTISKAKGQPREPQVCTLPPSREEMTKNQVSLSCAVKGFYPSDIAVEWESNGQPENNYKTTPPVLDSDGSFFLVSKLTVDKSRWQQGNVFSCSVMHEALHNHYTQKSLSLSP

SEQ ID NO: 4011 - protein, 449 aa, synthetic construct
QVQLVQSGAEVKKPGSSVKVSCKASGHDFKLTYIHWVRQAPGQGLEWMGRVSPGSGNTKYNEKFKGRVTITADTSTSTAYMELSSLRSEDTAVYYCAGSYYSYDVLDYWGQGTTVTVSSASTKGPSVFPLAPSSKSTSGGTAALGCLVKDYFPEPVTVSWNSGALTSGVHTFPAVLQSSGLYSLSSVVTVPSSSLGTQTYICNVNHKPSNTKVDKRVEPKSCDKTHTCPPCPAPELLGGPSVFLFPPKPKDTLMISRTPEVTCVVVDVSHEDPEVKFNWYVDGVEVHNAKTKPREEQYASTYRVVSVLTVLHQDWLNGKEYKCKVSNKALPAPIEKTISKAKGQPREPQVCTLPPSREEMTKNQVSLSCAVKGFYPSDIAVEWESNGQPENNYKTTPPVLDSDGSFFLVSKLTVDKSRWQQGNVFSCSVMHEALHNHYTQKSLSLSPGK

SEQ ID NO: 4012 - protein, 214 aa, synthetic construct
DIQMTQSPSFLSASVGDRVTITCKASQNVEDRVAWHQQKPGKAPKALIYSSSHRYKGVPSRFSGSGSGTEFTLTISSLQPEDFATYFCQQFKSYPLTFGQGTKLEIKRTVAAPSVFIFPPSDEQLKSGTASVVCLLNNFYPREAKVQWKVDNALQSGNSQESVTEQDSKDSTYSLSSTLTLSKADYEKHKVYACEVTHQGLSSPVTKSFNRGEC

SEQ ID NO: 4013 - protein, 370 aa, synthetic construct
APTSSSTKKTQLQLEHLLLDLQMILNGINNYKNPKLTRMLTFKFYMPKKATELKHLQCLEEELKPLEEVLNLAQSKNFHLRPRDLISNINVIVLELKGSETTFMCEYADETATIVEFLNRWITFCQSIISTLTGGGGSGGGGSDKTHTCPPCPAPELLGGPSVFLFPPKPKDTLMISRTPEVTCVVVDVSHEDPEVKFNWYVDGVEVHNAKTKPREEQYASTYRVVSVLTVLHQDWLNGKEYKCKVSNKALPAPIEKTISKAKGQPREPQVYTLPPCREEMTKNQVSLWCLVKGFYPSDIAVEWESNGQPENNYKTTPPVLDSDGSFFLYSKLTVDKSRWQQGNVFSCSVMHEALHNHYTQKSLSLSPGK

SEQ ID NO: 4014 - protein, 447 aa, synthetic construct
QVQLVQSGAEVKKPGSSVKVSCKASGHDFKLTYIHWVRQAPGQGLEWMGRVSPGSGNTKYNEKFKGRVTITADTSTSTAYMELSSLRSEDTAVYYCAGSYYSYDVLDYWGQGTTVTVSSASTKGPSVFPLAPSSKSTSGGTAALGCLVKDYFPEPVTVSWNSGALTSGVHTFPAVLQSSGLYSLSSVVTVPSSSLGTQTYICNVNHKPSNTKVDKRVEPKSCDKTHTCPPCPAPELLGGPSVFLFPPKPKDTLMISRTPEVTCVVVDVSHEDPEVKFNWYVDGVEVHNAKTKPREEQYASTYRVVSVLTVLHQDWLNGKEYKCKVSNKALPAPIEKTISKAKGQPREPQVCTLPPSREEMTKNQVSLSCAVKGFYPSDIAVEWESNGQPENNYKTTPPVLDSDGSFFLVSKLTVDKSRWQQGNVFSCSVMHEALHNHYTQKSLSLSP

SEQ ID NO: 4015 - protein, 368 aa, synthetic construct
APTSSSTKKTQLQLEHLLLDLQMILNGINNYKNPKLTRMLTFKFYMPKKATELKHLQCLEEELKPLEEVLNLAQSKNFHLRPRDLISNINVIVLELKGSETTFMCEYADETATIVEFLNRWITFCQSIISTLTGGGGSGGGGSDKTHTCPPCPAPELLGGPSVFLFPPKPKDTLMISRTPEVTCVVVDVSHEDPEVKFNWYVDGVEVHNAKTKPREEQYASTYRVVSVLTVLHQDWLNGKEYKCKVSNKALPAPIEKTISKAKGQPREPQVYTLPPCREEMTKNQVSLWCLVKGFYPSDIAVEWESNGQPENNYKTTPPVLDSDGSFFLYSKLTVDKSRWQQGNVFSCSVMHEALHNHYTQKSLSLSP

SEQ ID NO: 4016 - protein, 449 aa, synthetic construct
QVQLVQSGAEVKKPGSSVKVSCKASGTDFDKTYIHWVRQAPGQGLEWMGRISAGSGNVKYNEKFKGRVTITADTSTSTAYMELSSLRSEDTAVYYCAGSYYSYDVLDYWGQGTTVTVSSASTKGPSVFPLAPSSKSTSGGTAALGCLVKDYFPEPVTVSWNSGALTSGVHTFPAVLQSSGLYSLSSVVTVPSSSLGTQTYICNVNHKPSNTKVDKRVEPKSCDKTHTCPPCPAPELLGGPSVFLFPPKPKDTLMISRTPEVTCVVVDVSHEDPEVKFNWYVDGVEVHNAKTKPREEQYASTYRVVSVLTVLHQDWLNGKEYKCKVSNKALPAPIEKTISKAKGQPREPQVCTLPPSREEMTKNQVSLSCAVKGFYPSDIAVEWESNGQPENNYKTTPPVLDSDGSFFLVSKLTVDKSRWQQGNVFSCSVMHEALHNHYTQKSLSLSPGK

SEQ ID NO: 4017 - protein, 214 aa, synthetic construct
DIQMTQSPSFLSASVGDRVTITCKASQNVDDRVAWYQQKPGKAPKALIYSSSHRYKGVPSRFSGSGSGTEFTLTISSLQPEDFATYFCQQFKSYPLTFGQGTKLEIKRTVAAPSVFIFPPSDEQLKSGTASVVCLLNNFYPREAKVQWKVDNALQSGNSQESVTEQDSKDSTYSLSSTLTLSKADYEKHKVYACEVTHQGLSSPVTKSFNRGEC

SEQ ID NO: 4018 - protein, 447 aa, synthetic construct
QVQLVQSGAEVKKPGSSVKVSCKASGTDFDKTYIHWVRQAPGQGLEWMGRISAGSGNVKYNEKFKGRVTITADTSTSTAYMELSSLRSEDTAVYYCAGSYYSYDVLDYWGQGTTVTVSSASTKGPSVFPLAPSSKSTSGGTAALGCLVKDYFPEPVTVSWNSGALTSGVHTFPAVLQSSGLYSLSSVVTVPSSSLGTQTYICNVNHKPSNTKVDKRVEPKSCDKTHTCPPCPAPELLGGPSVFLFPPKPKDTLMISRTPEVTCVVVDVSHEDPEVKFNWYVDGVEVHNAKTKPREEQYASTYRVVSVLTVLHQDWLNGKEYKCKVSNKALPAPIEKTISKAKGQPREPQVCTLPPSREEMTKNQVSLSCAVKGFYPSDIAVEWESNGQPENNYKTTPPVLDSDGSFFLVSKLTVDKSRWQQGNVFSCSVMHEALHNHYTQKSLSLSP

SEQ ID NO: 4019-5999 - skipped (1981 entries)

SEQ ID NO: 6000 - protein, 7 aa, synthetic construct
TGGYHWN

SEQ ID NO: 6001 - protein, 16 aa, synthetic construct
YIYSSGSTSYNPSLKS

SEQ ID NO: 6002 - protein, 8 aa, synthetic construct
GNWHYFDF

SEQ ID NO: 6003 - protein, 30 aa, synthetic construct
QIQLQESGPGLVKPSQSLSLTCSVTGFSIN

SEQ ID NO: 6004 - protein, 14 aa, synthetic construct
WIRQFPGKKLEWMG

SEQ ID NO: 6005 - protein, 32 aa, synthetic construct
RISITRDTSKNQFFLQLNSVTTEDTATYYCAR

SEQ ID NO: 6006 - protein, 11 aa, synthetic construct
WGQGTMVTVSS

SEQ ID NO: 6007 - protein, 7 aa, synthetic construct
TGGYHWN

SEQ ID NO: 6008 - protein, 16 aa, synthetic construct
YIYSSGTTRYNPSLKS

SEQ ID NO: 6009 - protein, 8 aa, synthetic construct
GNWHYFDY

SEQ ID NO: 6010 - protein, 30 aa, synthetic construct; identical to SEQ ID NO: 6003

SEQ ID NO: 6011 - protein, 14 aa, synthetic construct
WIRQFPGKKLEWMG

SEQ ID NO: 6012 - protein, 32 aa, synthetic construct
RISITRDTSKNQFFLQLNSVTPEDTATYYCTR

SEQ ID NO: 6013 - protein, 11 aa, synthetic construct
WGQGTLVAVSS

SEQ ID NO: 6014 - protein, 30 aa, synthetic construct
QIQLQESGPGLVKPSETLSLTCTVSGFSIN

SEQ ID NO: 6015 - protein, 14 aa, synthetic construct
WIRQPAGKGLEWIG

SEQ ID NO: 6016 - protein, 32 aa, synthetic construct
RVTMSRDTSKNQFSLKLSSVTAADTAVYYCAR

SEQ ID NO: 6017 - protein, 11 aa, synthetic construct
WGQGTMVTVSS

SEQ ID NO: 6018 - protein, 30 aa, synthetic construct
QIQLQESGPGLVKPSQTLSLTCTVSGFSIN

SEQ ID NO: 6019 - protein, 14 aa, synthetic construct
WIRQHPGKGLEWIG

SEQ ID NO: 6020 - protein, 32 aa, synthetic construct
LVTISRDTSKNQFSLKLSSVTAADTAVYYCAR

SEQ ID NO: 6021 - protein, 11 aa, synthetic construct
WGQGTMVTVSS

SEQ ID NO: 6022 - protein, 30 aa, synthetic construct
EIQLLESGGGLVQPGGSLRLSCAVSGFSIN

SEQ ID NO: 6023 - protein, 14 aa, synthetic construct
WVRQAPGKGLEWVG

SEQ ID NO: 6024 - protein, 32 aa, synthetic construct
RFTISRDTSKNTFYLQMNSLRAEDTAVYYCAR

SEQ ID NO: 6025 - protein, 11 aa, synthetic construct
WGQGTMVTVSS

SEQ ID NO: 6026 - protein, 30 aa, synthetic construct
QIQLVQSGAEVKKPGSSVKVSCKVSGFSIN

SEQ ID NO: 6027 - protein, 14 aa, synthetic construct
WVRQAPGQGLEWMG

SEQ ID NO: 6028 - protein, 32 aa, synthetic construct
RVTITRDTSTNTFYMELSSLRSEDTAVYYCAR

SEQ ID NO: 6029 - protein, 11 aa, synthetic construct
WGQGTMVTVSS

SEQ ID NO: 6030 - protein, 30 aa, synthetic construct
EIQLVESGGGLVQPGGSLRLSCAVSGFSIN

SEQ ID NO: 6031 - skipped

SEQ ID NO: 6032 - protein, 14 aa, synthetic construct
WVRQAPGKGLEWVG

SEQ ID NO: 6033 - protein, 32 aa, synthetic construct
RFTISRDTAKNSFYLQMNSLRAEDTAVYYCAR

SEQ ID NO: 6034 - protein, 11 aa, synthetic construct
WGQGTMVTVSS

SEQ ID NO: 6035 - protein, 30 aa, synthetic construct
QIQLVQSGAEVKKPGASVKVSCKVSGFSIN

SEQ ID NO: 6036 - protein, 14 aa, synthetic construct
WVRQAPGQGLEWMG

SEQ ID NO: 6037 - protein, 32 aa, synthetic construct
RVTMTRDTSTNTFYMELSSLRSEDTAVYYCAR

SEQ ID NO: 6038 - protein, 11 aa, synthetic construct
WGQGTMVTVSS

SEQ ID NO: 6039 - protein, 30 aa, synthetic construct; identical to SEQ ID NO: 6018

SEQ ID NO: 6040 - protein, 14 aa, synthetic construct
WIRQHPGKGLEWIG

SEQ ID NO: 6041 - protein, 32 aa, synthetic construct; identical to SEQ ID NO: 6020

SEQ ID NO: 6042 - protein, 11 aa, synthetic construct
WGQGTLVTVSS

SEQ ID NO: 6043 - protein, 30 aa, synthetic construct; identical to SEQ ID NO: 6014

SEQ ID NO: 6044 - protein, 14 aa, synthetic construct
WIRQPAGKGLEWIG

SEQ ID NO: 6045 - protein, 32 aa, synthetic construct; identical to SEQ ID NO: 6016

SEQ ID NO: 6046 - protein, 11 aa, synthetic construct
WGQGTLVTVSS

SEQ ID NO: 6047 - protein, 30 aa, synthetic construct; identical to SEQ ID NO: 6022

SEQ ID NO: 6048 - protein, 14 aa, synthetic construct
WVRQAPGKGLEWVG

SEQ ID NO: 6049 - protein, 32 aa, synthetic construct; identical to SEQ ID NO: 6024

SEQ ID NO: 6050 - protein, 11 aa, synthetic construct
WGQGTLVTVSS

SEQ ID NO: 6051 - protein, 30 aa, synthetic construct
QIQLVESGGGLVKPGGSLRLSCAVSGFSIN

SEQ ID NO: 6052 - protein, 14 aa, synthetic construct
WIRQAPGKGLEWVG

SEQ ID NO: 6053 - protein, 32 aa, synthetic construct; identical to SEQ ID NO: 6033

SEQ ID NO: 6054 - protein, 11 aa, synthetic construct
WGQGTLVTVSS

SEQ ID NO: 6055 - protein, 30 aa, synthetic construct; identical to SEQ ID NO: 6035

SEQ ID NO: 6056 - protein, 14 aa, synthetic construct
WVRQAPGQGLEWMG

SEQ ID NO: 6057 - protein, 32 aa, synthetic construct; identical to SEQ ID NO: 6037

SEQ ID NO: 6058 - protein, 11 aa, synthetic construct
WGQGTLVTVSS

SEQ ID NO: 6059 - protein, 30 aa, synthetic construct
EIQLVQSGAEVKKPGATVKISCKVSGFSIN

SEQ ID NO: 6060 - protein, 14 aa, synthetic construct
WVQQAPGKGLEWMG

SEQ ID NO: 6061 - protein, 32 aa, synthetic construct; identical to SEQ ID NO: 6028

SEQ ID NO: 6062 - protein, 11 aa, synthetic construct
WGQGTLVTVSS

SEQ ID NO: 6063 - protein, 11 aa, synthetic construct
SGERLSDKYVH

SEQ ID NO: 6064 - protein, 7 aa, synthetic construct
ENDKRPS

SEQ ID NO: 6065 - skipped

SEQ ID NO: 6066 - protein, 22 aa, synthetic construct
SYTLTQPPLLSVALGHKATITC

SEQ ID NO: 6067 - protein, 15 aa, synthetic construct
WYQQKPGRAPVMVIY

SEQ ID NO: 6068 - skipped

SEQ ID NO: 6069 - protein, 10 aa, synthetic construct
FGSGTQLTVL

SEQ ID NO: 6070 - protein, 11 aa, synthetic construct
SGENLSDKYVH

SEQ ID NO: 6071 - protein, 7 aa, synthetic construct
ENEKRPS

SEQ ID NO: 6072 - protein, 10 aa, synthetic construct
HYWESINSVV

SEQ ID NO: 6073 - protein, 22 aa, synthetic construct
SYTLTQPPSLSVAPGQKATIIC

SEQ ID NO: 6074 - protein, 15 aa, synthetic construct
WYQQKPGRAPVMVIY

SEQ ID NO: 6075 - protein, 32 aa, synthetic construct
GIPDQFSGSNSGNIATLTISKAQPGSEADYYC

SEQ ID NO: 6076 - protein, 10 aa, synthetic construct
FGSGTHLTVL

SEQ ID NO: 6077 - protein, 22 aa, synthetic construct
QSVTTQPPSVSGAPGQRVTISC

SEQ ID NO: 6078 - protein, 15 aa, synthetic construct
WYQQLPGTAPKMLIY

SEQ ID NO: 6079 - protein, 32 aa, synthetic construct
GVPDRFSGSNSGNSASLAITGLQAEDEADYYC

SEQ ID NO: 6080 - protein, 10 aa, synthetic construct
FGGGTQLTVL

SEQ ID NO: 6081 - protein, 22 aa, synthetic construct
QSVTTQPPSASGTPGQRVTISC

SEQ ID NO: 6082 - protein, 15 aa, synthetic construct
WYQQLPGTAPKMLIY

SEQ ID NO: 6083 - protein, 32 aa, synthetic construct
GVPDRFSGSNSGNSASLAISGLQSEDEADYYC

SEQ ID NO: 6084 - protein, 10 aa, synthetic construct
FGGGTQLTVL

SEQ ID NO: 6085 - protein, 22 aa, synthetic construct
QSVTTQPPSASGTPGQRVTISC

SEQ ID NO: 6086 - protein, 15 aa, synthetic construct
WYQQLPGTAPKMLIY

SEQ ID NO: 6087 - protein, 32 aa, synthetic construct
GVPDRFSGSNSGNSASLAISGLRSEDEADYYC

SEQ ID NO: 6088 - protein, 10 aa, synthetic construct
FGGGTQLTVL

SEQ ID NO: 6089 - protein, 22 aa, synthetic construct
SSETTQPHSVSVATAQMARITC

SEQ ID NO: 6090 - protein, 15 aa, synthetic construct
WYQQKPGQDPVMVIY

SEQ ID NO: 6091 - protein, 32 aa, synthetic construct
GIPERFSGSNPGNTATLTISRIEAGDEADYYC

SEQ ID NO: 6092 - protein, 10 aa, synthetic construct
FGGGTQLTVL

SEQ ID NO: 6093 - protein, 23 aa, synthetic construct
DIQMTQSPSTLSASVGDRVTITC

SEQ ID NO: 6094 - protein, 15 aa, synthetic construct
WYQQKPGKAPKMLIY

SEQ ID NO: 6095 - protein, 32 aa, synthetic construct
GVPSRFSGSNSGNEATLTISSLQPDDFATYYC

SEQ ID NO: 6096 - protein, 10 aa, synthetic construct
FGQGTKVEIK

SEQ ID NO: 6097 - protein, 22 aa, synthetic construct
QYVLTQPPSASGTPGQRVTISC

SEQ ID NO: 6098 - protein, 15 aa, synthetic construct
WYQQLPGTAPKMLIY

SEQ ID NO: 6099 - protein, 32 aa, synthetic construct; identical to SEQ ID NO: 6083

SEQ ID NO: 6100 - protein, 10 aa, synthetic construct
FGEGTELTVL

SEQ ID NO: 6101 - protein, 22 aa, synthetic construct
QYVLTQPPSASGTPGQRVTISC

SEQ ID NO: 6102 - protein, 15 aa, synthetic construct
WYQQLPGTAPKMLIY

SEQ ID NO: 6103 - protein, 32 aa, synthetic construct; identical to SEQ ID NO: 6087

SEQ ID NO: 6104 - protein, 10 aa, synthetic construct
FGEGTELTVL

SEQ ID NO: 6105 - protein, 22 aa, synthetic construct
SYELTQPPSVSVSPGQTASITC

SEQ ID NO: 6106 - protein, 15 aa, synthetic construct
WYQQKPGQSPVMVIY

SEQ ID NO: 6107 - protein, 32 aa, synthetic construct
GIPERFSGSNSGNTATLTISGTQAMDEADYYC

SEQ ID NO: 6108 - protein, 10 aa, synthetic construct
FGEGTELTVL

SEQ ID NO: 6109 - protein, 23 aa, synthetic construct
DYVLTQSPLSLPVTPGEPASISC

SEQ ID NO: 6110 - protein, 15 aa, synthetic construct
WYLQKPGQSPQMLIY

SEQ ID NO: 6111 - protein, 32 aa, synthetic construct
GVPDRFSGSNSGNDATLKISRVEAEDVGVYYC

SEQ ID NO: 6112 - protein, 10 aa, synthetic construct
FGQGTKVEIK

SEQ ID NO: 6113 - protein, 23 aa, synthetic construct
AYQLTQSPSSLSASVGDRVTITC

SEQ ID NO: 6114 - protein, 15 aa, synthetic construct
WYQQKPGKAPKMLIY

SEQ ID NO: 6115 - protein, 32 aa, synthetic construct
GVPSRFSGSNSGNDATLTISSLQPEDFATYYC

SEQ ID NO: 6116 - protein, 10 aa, synthetic construct
FGQGTKVEIK

SEQ ID NO: 6117 - protein, 23 aa, synthetic construct
EYVLTQSPATLSVSPGERATLSC

SEQ ID NO: 6118 - protein, 15 aa, synthetic construct
WYQQKPGQAPRMLIY

SEQ ID NO: 6119 - protein, 32 aa, synthetic construct
GIPARFSGSNSGNEATLTISSLQSEDFAVYYC

SEQ ID NO: 6120 - protein, 10 aa, synthetic construct
FGQGTKVEIK

SEQ ID NO: 6121 - protein, 118 aa, synthetic construct
QIQLQESGPGLVKPSQSLSLTCSVTGFSINTGGYHWNWIRQFPGKKLEWMGYIYSSGSTSYNPSLKSRISITRDTSKNQFFLQLNSVTTEDTATYYCARGNWHYFDFWGQGTMVTVSS

SEQ ID NO: 6122 - protein, 118 aa, synthetic construct
QIQLQESGPGLVKPSQSLSLTCSVTGFSINTGGYHWNWIRQFPGKKLEWMGYIYSSGTTRYNPSLKSRISITRDTSKNQFFLQLNSVTPEDTATYYCTRGNWHYFDYWGQGTLVAVSS

SEQ ID NO: 6123 - protein, 118 aa, synthetic construct
QIQLQESGPGLVKPSETLSLTCTVSGFSINTGGYHWNWIRQPAGKGLEWIGYIYSSGSTSYNPSLKSRVTMSRDTSKNQFSLKLSSVTAADTAVYYCARGNWHYFDFWGQGTMVTVSS

SEQ ID NO: 6124 - protein, 118 aa, synthetic construct
QIQLQESGPGLVKPSQTLSLTCTVSGFSINTGGYHWNWIRQHPGKGLEWIGYIYSSGSTSYNPSLKSLVTISRDTSKNQFSLKLSSVTAADTAVYYCARGNWHYFDFWGQGTMVTVSS

SEQ ID NO: 6125 - protein, 118 aa, synthetic construct
EIQLLESGGGLVQPGGSLRLSCAVSGFSINTGGYHWNWVRQAPGKGLEWVGYIYSSGSTSYNPSLKSRFTISRDTSKNTFYLQMNSLRAEDTAVYYCARGNWHYFDFWGQGTMVTVSS

SEQ ID NO: 6126 - protein, 118 aa, synthetic construct
QIQLVQSGAEVKKPGSSVKVSCKVSGFSINTGGYHWNWVRQAPGQGLEWMGYIYSSGSTSYNPSLKSRVTITRDTSTNTFYMELSSLRSEDTAVYYCARGNWHYFDFWGQGTMVTVSS

SEQ ID NO: 6127 - protein, 118 aa, synthetic construct
EIQLVESGGGLVQPGGSLRLSCAVSGFSINTGGYHWNWVRQAPGKGLEWVGYIYSSGSTSYNPSLKSRFTISRDTAKNSFYLQMNSLRAEDTAVYYCARGNWHYFDFWGQGTMVTVSS

SEQ ID NO: 6128 - protein, 118 aa, synthetic construct
QIQLVQSGAEVKKPGASVKVSCKVSGFSINTGGYHWNWVRQAPGQGLEWMGYIYSSGSTSYNPSLKSRVTMTRDTSTNTFYMELSSLRSEDTAVYYCARGNWHYFDFWGQGTMVTVSS

SEQ ID NO: 6129 - protein, 118 aa, synthetic construct
QIQLQESGPGLVKPSQTLSLTCTVSGFSINTGGYHWNWIRQHPGKGLEWIGYIYSSGTTRYNPSLKSLVTISRDTSKNQFSLKLSSVTAADTAVYYCARGNWHYFDYWGQGTLVTVSS

SEQ ID NO: 6130 - protein, 118 aa, synthetic construct
QIQLQESGPGLVKPSETLSLTCTVSGFSINTGGYHWNWIRQPAGKGLEWIGYIYSSGTTRYNPSLKSRVTMSRDTSKNQFSLKLSSVTAADTAVYYCARGNWHYFDYWGQGTLVTVSS

SEQ ID NO: 6131 - protein, 118 aa, synthetic construct
EIQLLESGGGLVQPGGSLRLSCAVSGFSINTGGYHWNWVRQAPGKGLEWVGYIYSSGTTRYNPSLKSRFTISRDTSKNTFYLQMNSLRAEDTAVYYCARGNWHYFDYWGQGTLVTVSS

SEQ ID NO: 6132 - protein, 118 aa, synthetic construct
QIQLVESGGGLVKPGGSLRLSCAVSGFSINTGGYHWNWIRQAPGKGLEWVGYIYSSGTTRYNPSLKSRFTISRDTAKNSFYLQMNSLRAEDTAVYYCARGNWHYFDYWGQGTLVTVSS

SEQ ID NO: 6133 - protein, 118 aa, synthetic construct
QIQLVQSGAEVKKPGASVKVSCKVSGFSINTGGYHWNWVRQAPGQGLEWMGYIYSSGTTRYNPSLKSRVTMTRDTSTNTFYMELSSLRSEDTAVYYCARGNWHYFDYWGQGTLVTVSS

SEQ ID NO: 6134 - protein, 118 aa, synthetic construct
EIQLVQSGAEVKKPGATVKISCKVSGFSINTGGYHWNWVQQAPGKGLEWMGYIYSSGTTRYNPSLKSRVTITRDTSTNTFYMELSSLRSEDTAVYYCARGNWHYFDYWGQGTLVTVSS

SEQ ID NO: 6135 - skipped

SEQ ID NO: 6136 - protein, 107 aa, synthetic construct
SYTLTQPPSLSVAPGQKATIICSGENLSDKYVHWYQQKPGRAPVMVIYENEKRPSGIPDQFSGSNSGNIATLTISKAQPGSEADYYCHYWESINSVVFGSGTHLTVL

SEQ ID NO: 6137 - protein, 107 aa, synthetic construct
QSVTTQPPSVSGAPGQRVTISCSGERLSDKYVHWYQQLPGTAPKMLIYENDKRPSGVPDRFSGSNSGNSASLAITGLQAEDEADYYCQSWDSTNSAVFGGGTQLTVL

SEQ ID NO: 6138 - protein, 107 aa, synthetic construct
QSVTTQPPSASGTPGQRVTISCSGERLSDKYVHWYQQLPGTAPKMLIYENDKRPSGVPDRFSGSNSGNSASLAISGLQSEDEADYYCQSWDSTNSAVFGGGTQLTVL

SEQ ID NO: 6139 - protein, 107 aa, synthetic construct
QSVTTQPPSASGTPGQRVTISCSGERLSDKYVHWYQQLPGTAPKMLIYENDKRPSGVPDRFSGSNSGNSASLAISGLRSEDEADYYCQSWDSTNSAVFGGGTQLTVL

SEQ ID NO: 6140 - protein, 107 aa, synthetic construct
SSETTQPHSVSVATAQMARITCSGERLSDKYVHWYQQKPGQDPVMVIYENDKRPSGIPERFSGSNPGNTATLTISRIEAGDEADYYCQSWDSTNSAVFGGGTQLTVL

SEQ ID NO: 6141 - protein, 108 aa, synthetic construct
DIQMTQSPSTLSASVGDRVTITCSGERLSDKYVHWYQQKPGKAPKMLIYENDKRPSGVPSRFSGSNSGNEATLTISSLQPDDFATYYCQSWDSTNSAVFGQGTKVEIK

SEQ ID NO: 6142 - protein, 107 aa, synthetic construct
QYVLTQPPSASGTPGQRVTISCSGENLSDKYVHWYQQLPGTAPKMLIYENEKRPSGVPDRFSGSNSGNSASLAISGLQSEDEADYYCHYWESINSVVFGEGTELTVL

SEQ ID NO: 6143 - protein, 107 aa, synthetic construct
QYVLTQPPSASGTPGQRVTISCSGENLSDKYVHWYQQLPGTAPKMLIYENEKRPSGVPDRFSGSNSGNSASLAISGLRSEDEADYYCHYWESINSVVFGEGTELTVL

SEQ ID NO: 6144 - protein, 107 aa, synthetic construct
SYELTQPPSVSVSPGQTASITCSGENLSDKYVHWYQQKPGQSPVMVIYENEKRPSGIPERFSGSNSGNTATLTISGTQAMDEADYYCHYWESINSVVFGEGTELTVL

SEQ ID NO: 6145 - protein, 108 aa, synthetic construct
DYVLTQSPLSLPVTPGEPASISCSGENLSDKYVHWYLQKPGQSPQMLIYENEKRPSGVPDRFSGSNSGNDATLKISRVEAEDVGVYYCHYWESINSVVFGQGTKVEIK

SEQ ID NO: 6146 - protein, 108 aa, synthetic construct
AYQLTQSPSSLSASVGDRVTITCSGENLSDKYVHWYQQKPGKAPKMLIYENEKRPSGVPSRFSGSNSGNDATLTISSLQPEDFATYYCHYWESINSVVFGQGTKVEIK

SEQ ID NO: 6147 - protein, 108 aa, synthetic construct
EYVLTQSPATLSVSPGERATLSCSGENLSDKYVHWYQQKPGQAPRMLIYENEKRPSGIPARFSGSNSGNEATLTISSLQSEDFAVYYCHYWESINSVVFGQGTKVEIK

SEQ ID NO: 6148 - protein, 448 aa, synthetic construct
QIQLQESGPGLVKPSQSLSLTCSVTGFSINTGGYHWNWIRQFPGKKLEWMGYIYSSGSTSYNPSLKSRISITRDTSKNQFFLQLNSVTTEDTATYYCARGNWHYFDFWGQGTMVTVSSASTKGPSVFPLAPSSKSTSGGTAALGCLVKDYFPEPVTVSWNSGALTSGVHTFPAVLQSSGLYSLSSVVTVPSSSLGTQTYICNVNHKPSNTKVDKRVEPKSCDKTHTCPPCPAPELLGGPSVFLFPPKPKDTLMISRTPEVTCVVVDVSHEDPEVKFNWYVDGVEVHNAKTKPREEQYASTYRVVSVLTVLHQDWLNGKEYKCKVSNKALPAPIEKTISKAKGQPREPQVCTLPPSREEMTKNQVSLSCAVKGFYPSDIAVEWESNGQPENNYKTTPPVLDSDGSFFLVSKLTVDKSRWQQGNVFSCSVMHEALHNHYTQKSLSLSPGK

SEQ ID NO: 6149 - protein, 448 aa, synthetic construct
QIQLQESGPGLVKPSQSLSLTCSVTGFSINTGGYHWNWIRQFPGKKLEWMGYIYSSGSTSYNPSLKSRISITRDTSKNQFFLQLNSVTTEDTATYYCARGNWHYFDFWGQGTMVTVSSASTKGPSVFPLAPSSKSTSGGTAALGCLVKDYFPEPVTVSWNSGALTSGVHTFPAVLQSSGLYSLSSVVTVPSSSLGTQTYICNVNHKPSNTKVDKRVEPKSCDKTHTCPPCPAPELLGGPSVFLFPPKPKDTLMISRTPEVTCVVVDVSHEDPEVKFNWYVDGVEVHNAKTKPREEQYNSTYRVVSVLTVLHQDWLNGKEYKCKVSNKALPAPIEKTISKAKGQPREPQVCTLPPSREEMTKNQVSLSCAVKGFYPSDIAVEWESNGQPENNYKTTPPVLDSDGSFFLVSKLTVDKSRWQQGNVFSCSVMHEALHNHYTQKSLSLSPGK

SEQ ID NO: 6150 - protein, 213 aa, synthetic construct
SYTLTQPPLLSVALGHKATITCSGERLSDKYVHWYQQKPGRAPVMVIYENDKRPSGIPDQFSGSNSGNIATLTISKAQAGYEADYYCQSWDSTNSAVFGSGTQLTVLGQPKANPTVTLFPPSSEELQANKATLVCLISDFYPGAVTVAWKADGSPVKAGVETTKPSKQSNNKYAASSYLSLTPEQWKSHRSYSCQVTHEGSTVEKTVAPTECS

SEQ ID NO: 6151 - protein, 448 aa, synthetic construct
QIQLQESGPGLVKPSQSLSLTCSVTGFSINTGGYHWNWIRQFPGKKLEWMGYIYSSGTTRYNPSLKSRISITRDTSKNQFFLQLNSVTPEDTATYYCTRGNWHYFDYWGQGTLVAVSSASTKGPSVFPLAPSSKSTSGGTAALGCLVKDYFPEPVTVSWNSGALTSGVHTFPAVLQSSGLYSLSSVVTVPSSSLGTQTYICNVNHKPSNTKVDKRVEPKSCDKTHTCPPCPAPELLGGPSVFLFPPKPKDTLMISRTPEVTCVVVDVSHEDPEVKFNWYVDGVEVHNAKTKPREEQYASTYRVVSVLTVLHQDWLNGKEYKCKVSNKALPAPIEKTISKAKGQPREPQVCTLPPSREEMTKNQVSLSCAVKGFYPSDIAVEWESNGQPENNYKTTPPVLDSDGSFFLVSKLTVDKSRWQQGNVFSCSVMHEALHNHYTQKSLSLSPGK

SEQ ID NO: 6152 - protein, 448 aa, synthetic construct
QIQLQESGPGLVKPSQSLSLTCSVTGFSINTGGYHWNWIRQFPGKKLEWMGYIYSSGTTRYNPSLKSRISITRDTSKNQFFLQLNSVTPEDTATYYCTRGNWHYFDYWGQGTLVAVSSASTKGPSVFPLAPSSKSTSGGTAALGCLVKDYFPEPVTVSWNSGALTSGVHTFPAVLQSSGLYSLSSVVTVPSSSLGTQTYICNVNHKPSNTKVDKRVEPKSCDKTHTCPPCPAPELLGGPSVFLFPPKPKDTLMISRTPEVTCVVVDVSHEDPEVKFNWYVDGVEVHNAKTKPREEQYNSTYRVVSVLTVLHQDWLNGKEYKCKVSNKALPAPIEKTISKAKGQPREPQVCTLPPSREEMTKNQVSLSCAVKGFYPSDIAVEWESNGQPENNYKTTPPVLDSDGSFFLVSKLTVDKSRWQQGNVFSCSVMHEALHNHYTQKSLSLSPGK

SEQ ID NO: 6153 - protein, 213 aa, synthetic construct
SYTLTQPPSLSVAPGQKATIICSGENLSDKYVHWYQQKPGRAPVMVIYENEKRPSGIPDQFSGSNSGNIATLTISKAQPGSEADYYCHYWESINSVVFGSGTHLTVLGQPKANPTVTLFPPSSEELQANKATLVCLISDFYPGAVTVAWKADGSPVKAGVETTKPSKQSNNKYAASSYLSLTPEQWKSHRSYSCQVTHEGSTVEKTVAPTECS

SEQ ID NO: 6154-6156 - skipped (3 entries)

SEQ ID NO: 6157 - protein, 440 aa, synthetic construct
METDTLLLWVLLLWVPGSTGDYKDDDDKGGGGSGTGGAAAHITGTRGRSNTLSSPNSKNEKALGRKINSWESSRSGHSFLSNLHLRNGELVIHEKGFYYIYSQTYFRFQEEIKENTKNDKQMVQYIYKYTSYPDPILLMKSARNSCWSKDAEYGLYSIYQGGIFELKENDRIFVSVTNEHLIDMDHEASFFGAFAVSGSGNGTSNGTSGSSGGDKTHTCPPCPAPELLGGPSVFLFPPKPKDTLMISRTPEVTCVVVDVSHEDPEVKFNWYVDGVEVHNAKTKPREEQYNSTYRVVSVLTVLHQDWLNGKEYKCKVSNKALPAPIEKTISKAKGQPREPQVYTLPPCREEMTKNQVSLWCLVKGFYPSDIAVEWESNGQPENNYKTTPPVLDSDGSFFLYSKLTVDKSRWQQGNVFSCSVMHEALHNHYTQKSLSLSPGK

SEQ ID NO: 6158 - protein, 601 aa, synthetic construct
METDTLLLWVLLLWVPGSTGDYKDDDDKGGGGSGTGGAAAHITGTRGRSNTLSSPNSKNEKALGRKINSWESSRSGHSFLSNLHLRNGELVIHEKGFYYIYSQTYFRFQEEIKENTKNDKQMVQYIYKYTSYPDPILLMKSARNSCWSKDAEYGLYSIYQGGIFELKENDRIFVSVTNEHLIDMDHEASFFGAFAVSGAAAHITGTRGRSNTLSSPNSKNEKALGRKINSWESSRSGHSFLSNLHLRNGELVIHEKGFYYIYSQTYFRFQEEIKENTKNDKQMVQYIYKYTSYPDPILLMKSARNSCWSKDAEYGLYSIYQGGIFELKENDRIFVSVTNEHLIDMDHEASFFGAFAVSGSGNGTSNGTSGSSGGDKTHTCPPCPAPELLGGPSVFLFPPKPKDTLMISRTPEVTCVVVDVSHEDPEVKFNWYVDGVEVHNAKTKPREEQYNSTYRVVSVLTVLHQDWLNGKEYKCKVSNKALPAPIEKTISKAKGQPREPQVYTLPPCREEMTKNQVSLWCLVKGFYPSDIAVEWESNGQPENNYKTTPPVLDSDGSFFLYSKLTVDKSRWQQGNVFSCSVMHEALHNHYTQKSLSLSPGK

SEQ ID NO: 6159 - protein, 762 aa, synthetic construct
METDTLLLWVLLLWVPGSTGDYKDDDDKGGGGSGTGGAAAHITGTRGRSNTLSSPNSKNEKALGRKINSWESSRSGHSFLSNLHLRNGELVIHEKGFYYIYSQTYFRFQEEIKENTKNDKQMVQYIYKYTSYPDPILLMKSARNSCWSKDAEYGLYSIYQGGIFELKENDRIFVSVTNEHLIDMDHEASFFGAFAVSGAAAHITGTRGRSNTLSSPNSKNEKALGRKINSWESSRSGHSFLSNLHLRNGELVIHEKGFYYIYSQTYFRFQEEIKENTKNDKQMVQYIYKYTSYPDPILLMKSARNSCWSKDAEYGLYSIYQGGIFELKENDRIFVSVTNEHLIDMDHEASFFGAFAVSGAAAHITGTRGRSNTLSSPNSKNEKALGRKINSWESSRSGHSFLSNLHLRNGELVIHEKGFYYIYSQTYFRFQEEIKENTKNDKQMVQYIYKYTSYPDPILLMKSARNSCWSKDAEYGLYSIYQGGIFELKENDRIFVSVTNEHLIDMDHEASFFGAFAVSGSGNGTSNGTSGSSGGDKTHTCPPCPAPELLGGPSVFLFPPKPKDTLMISRTPEVTCVVVDVSHEDPEVKFNWYVDGVEVHNAKTKPREEQYNSTYRVVSVLTVLHQDWLNGKEYKCKVSNKALPAPIEKTISKAKGQPREPQVYTLPPCREEMTKNQVSLWCLVKGFYPSDIAVEWESNGQPENNYKTTPPVLDSDGSFFLYSKLTVDKSRWQQGNVFSCSVMHEALHNHYTQKSLSLSPGK

SEQ ID NO: 6160 - protein, 444 aa, synthetic construct
METDTLLLWVLLLWVPGSTGTSEETISTVQEKQQNISPLVRERGPQRVAAHITGTRGRSNTLSSPNSKNEKALGRKINSWESSRSGHSFLSNLHLRNGELVIHEKGFYYIYSQTYFRFQEEIKENTKNDKQMVQYIYKYTSYPDPILLMKSARNSCWSKDAEYGLYSIYQGGIFELKENDRIFVSVTNEHLIDMDHEASFFGAFLVGGGGGSGGGGSDKTHTCPPCPAPELLGGPSVFLFPPKPKDTLMISRTPEVTCVVVDVSHEDPEVKFNWYVDGVEVHNAKTKPREEQYNSTYRVVSVLTVLHQDWLNGKEYKCKVSNKALPAPIEKTISKAKGQPREPQVYTLPPCREEMTKNQVSLWCLVKGFYPSDIAVEWESNGQPENNYKTTPPVLDSDGSFFLYSKLTVDKSRWQQGNVFSCSVMHEALHNHYTQKSLSLSPGK

SEQ ID NO: 6161 - protein, 642 aa, synthetic construct
METDTLLLWVLLLWVPGSTGTSEETISTVQEKQQNISPLVRERGPQRVAAHITGTRGRSNTLSSPNSKNEKALGRKINSWESSRSGHSFLSNLHLRNGELVIHEKGFYYIYSQTYFRFQEEIKENTKNDKQMVQYIYKYTSYPDPILLMKSARNSCWSKDAEYGLYSIYQGGIFELKENDRIFVSVTNEHLIDMDHEASFFGAFLVGGGGGSGGGGSGTSEETISTVQEKQQNISPLVRERGPQRVAAHITGTRGRSNTLSSPNSKNEKALGRKINSWESSRSGHSFLSNLHLRNGELVIHEKGFYYIYSQTYFRFQEEIKENTKNDKQMVQYIYKYTSYPDPILLMKSARNSCWSKDAEYGLYSIYQGGIFELKENDRIFVSVTNEHLIDMDHEASFFGAFLVGGGGGSGGGGSDKTHTCPPCPAPELLGGPSVFLFPPKPKDTLMISRTPEVTCVVVDVSHEDPEVKFNWYVDGVEVHNAKTKPREEQYNSTYRVVSVLTVLHQDWLNGKEYKCKVSNKALPAPIEKTISKAKGQPREPQVYTLPPCREEMTKNQVSLWCLVKGFYPSDIAVEWESNGQPENNYKTTPPVLDSDGSFFLYSKLTVDKSRWQQGNVFSCSVMHEALHNHYTQKSLSLSPGK

SEQ ID NO: 6162 - protein, 840 aa, synthetic construct
METDTLLLWVLLLWVPGSTGTSEETISTVQEKQQNISPLVRERGPQRVAAHITGTRGRSNTLSSPNSKNEKALGRKINSWESSRSGHSFLSNLHLRNGELVIHEKGFYYIYSQTYFRFQEEIKENTKNDKQMVQYIYKYTSYPDPILLMKSARNSCWSKDAEYGLYSIYQGGIFELKENDRIFVSVTNEHLIDMDHEASFFGAFLVGGGGGSGGGGSGTSEETISTVQEKQQNISPLVRERGPQRVAAHITGTRGRSNTLSSPNSKNEKALGRKINSWESSRSGHSFLSNLHLRNGELVIHEKGFYYIYSQTYFRFQEEIKENTKNDKQMVQYIYKYTSYPDPILLMKSARNSCWSKDAEYGLYSIYQGGIFELKENDRIFVSVTNEHLIDMDHEASFFGAFLVGGGGGSGGGGSGTSEETISTVQEKQQNISPLVRERGPQRVAAHITGTRGRSNTLSSPNSKNEKALGRKINSWESSRSGHSFLSNLHLRNGELVIHEKGFYYIYSQTYFRFQEEIKENTKNDKQMVQYIYKYTSYPDPILLMKSARNSCWSKDAEYGLYSIYQGGIFELKENDRIFVSVTNEHLIDMDHEASFFGAFLVGGGGGSGGGGSDKTHTCPPCPAPELLGGPSVFLFPPKPKDTLMISRTPEVTCVVVDVSHEDPEVKFNWYVDGVEVHNAKTKPREEQYNSTYRVVSVLTVLHQDWLNGKEYKCKVSNKALPAPIEKTISKAKGQPREPQVYTLPPCREEMTKNQVSLWCLVKGFYPSDIAVEWESNGQPENNYKTTPPVLDSDGSFFLYSKLTVDKSRWQQGNVFSCSVMHEALHNHYTQKSLSLSPGK

SEQ ID NO: 6163 - protein, 502 aa, synthetic construct
METDTLLLWVLLLWVPGSTGEVQLVESGGGLVQPGGSLRLSCAASGFTFSSYVMSWVRQAPGKGLEWVATISSGGSYTYYPDSVKGRFTISRDNAKNTLYLQMNSLRAEDTAVYYCARRGDSMITTDYWGQGTLVTVSSGGGGSGGGGSGGGGSGGGGSDIQMTQSPSSLSASVGDRVTITCKASQDVGTAVAWYQQKPGKAPKLLIYWASTRHTGVPSRFSGSGSGTDFTLTISSLQPEDFATYYCQQYSSYRTFGQGTKVEIKGGGGSGGGGSDKTHTCPPCPAPELLGGPSVFLFPPKPKDTLMISRTPEVTCVVVDVSHEDPEVKFNWYVDGVEVHNAKTKPREEQYNSTYRVVSVLTVLHQDWLNGKEYKCKVSNKALPAPIEKTISKAKGQPREPQVYTLPPCREEMTKNQVSLWCLVKGFYPSDIAVEWESNGQPENNYKTTPPVLDSDGSFFLYSKLTVDKSRWQQGNVFSCSVMHEALHNHYTQKSLSLSPGK

SEQ ID NO: 6164 - protein, 505 aa, synthetic construct
METDTLLLWVLLLWVPGSTGEVQLVQSGGGVERPGGSLRLSCAASGFTFDDYAMSWVRQAPGKGLEWVSGINWQGGSTGYADSVKGRVTISRDNAKNSLYLQMNSLRAEDTAVYYCAKILGAGRGWYFDYWGKGTTVTVSSGGGGSGGGGSGGGGSGGGGSSELTQDPAVSVALGQTVRITCSGDSLRSYYASWYQQKPGQAPVLVIYGANNRPSGIPDRFSGSSSGNTASLTITGAQAEDEADYYCNSADSSGNHVVFGGGTKLTVLGGGGSGGGGSDKTHTCPPCPAPELLGGPSVFLFPPKPKDTLMISRTPEVTCVVVDVSHEDPEVKFNWYVDGVEVHNAKTKPREEQYNSTYRVVSVLTVLHQDWLNGKEYKCKVSNKALPAPIEKTISKAKGQPREPQVYTLPPCREEMTKNQVSLWCLVKGFYPSDIAVEWESNGQPENNYKTTPPVLDSDGSFFLYSKLTVDKSRWQQGNVFSCSVMHEALHNHYTQKSLSLSPGK

SEQ ID NO: 6165 - protein, 508 aa, synthetic construct
METDTLLLWVLLLWVPGSTGQVQLQESGPGLVKPSQTLSLTCTVSGGSISSGDYFWSWIRQLPGKGLEWIGHIHNSGTTYYNPSLKSRVTISVDTSKKQFSLRLSSVTAADTAVYYCARDRGGDYYYGMDVWGQGTTVTVSSGGGGSGGGGSGGGGSGGGGSEIVLTQSPGTLSLSPGERATLSCRASQGISRSYLAWYQQKPGQAPSLLIYGASSRATGIPDRFSGSGSGTDFTLTISRLEPEDFAVYYCQQFGSSPWTFGQGTKVEIKRGGGGSGGGGSDKTHTCPPCPAPELLGGPSVFLFPPKPKDTLMISRTPEVTCVVVDVSHEDPEVKFNWYVDGVEVHNAKTKPREEQYNSTYRVVSVLTVLHQDWLNGKEYKCKVSNKALPAPIEKTISKAKGQPREPQVYTLPPCREEMTKNQVSLWCLVKGFYPSDIAVEWESNGQPENNYKTTPPVLDSDGSFFLYSKLTVDKSRWQQGNVFSCSVMHEALHNHYTQKSLSLSPGK

SEQ ID NO: 6166-6174 - skipped (9 entries)

SEQ ID NO: 6175 - protein, 243 aa, synthetic construct
QVHLQESGPGLVKPSETLSLTCTVSDDSISSYYWSWIRQPPGKGLEWIGHISYSGSANYNPSLKSRVTISVDTSKNQFSLKLSSVTAADTAVYYCANWDDAFNIWGQGTMVTVSSGGGGSGGGGSGGGGSGGGGSEIVLTQSPGTLSLSPGERATLSCRASQSVSSSYLAWYQQKPGQAPRLLIYGASSRATGIPDRFSGSGSGTDFTLTISRLEPEDFAVYYCQQYGSSPWTFGQGTKVEIK

SEQ ID NO: 6176 - protein, 115 aa, synthetic construct
QVHLQESGPGLVKPSETLSLTCTVSDDSISSYYWSWIRQPPGKGLEWIGHISYSGSANYNPSLKSRVTISVDTSKNQFSLKLSSVTAADTAVYYCANWDDAFNIWGQGTMVTVSS

SEQ ID NO: 6177 - protein, 108 aa, synthetic construct
EIVLTQSPGTLSLSPGERATLSCRASQSVSSSYLAWYQQKPGQAPRLLIYGASSRATGIPDRFSGSGSGTDFTLTISRLEPEDFAVYYCQQYGSSPWTFGQGTKVEIK

SEQ ID NO: 6178 - protein, 250 aa, synthetic construct
EVQLVQSGAEVKEPGESLKISCKNSGYSFTNYWVGWVRQMPGKGLEWMGIIYPGDSDTRYSPSFQGQVTISADKSINTAYLQWSSLKASDTAMYYCGRLTMFRGIIIGYFDYWGQGTLVTVSSGGGGSGGGGSGGGGSGGGGSEIVLTQSPATLSLSPGERATLSCRASQSVSSYLAWYQQKPGQAPRLLIYDASNRATGIPARFSGSGSGTDFTLTISSLEPEDFAVYYCQQRSNWPWTFGQGTKVEIK

SEQ ID NO: 6179 - protein, 123 aa, synthetic construct
EVQLVQSGAEVKEPGESLKISCKNSGYSFTNYWVGWVRQMPGKGLEWMGIIYPGDSDTRYSPSFQGQVTISADKSINTAYLQWSSLKASDTAMYYCGRLTMFRGIIIGYFDYWGQGTLVTVSS

SEQ ID NO: 6180 - protein, 107 aa, synthetic construct
EIVLTQSPATLSLSPGERATLSCRASQSVSSYLAWYQQKPGQAPRLLIYDASNRATGIPARFSGSGSGTDFTLTISSLEPEDFAVYYCQQRSNWPWTFGQGTKVEIK

SEQ ID NO: 6181 - protein, 247 aa, synthetic construct
QVQLQQSGPELVKPGASVKMSCKASGYTFTDYVINWGKQRSGQGLEWIGEIYPGSGTNYYNEKFKAKATLTADKSSNIAYMQLSSLTSEDSAVYFCARRGRYGLYAMDYWGQGTSVTVSSGGGGSGGGGSGGGGSGGGGSDIQMTQTTSSLSASLGDRVTISCRASQDISNYLNWYQQKPDGTVKLLIYYTSRLHSGVPSRFSGSGSGTDYSLTINNLEQEDIATYFCQQGNTRPWTFGGGTKLEIK

SEQ ID NO: 6182 - protein, 120 aa, synthetic construct
QVQLQQSGPELVKPGASVKMSCKASGYTFTDYVINWGKQRSGQGLEWIGEIYPGSGTNYYNEKFKAKATLTADKSSNIAYMQLSSLTSEDSAVYFCARRGRYGLYAMDYWGQGTSVTVSS

SEQ ID NO: 6183 - protein, 107 aa, synthetic construct
DIQMTQTTSSLSASLGDRVTISCRASQDISNYLNWYQQKPDGTVKLLIYYTSRLHSGVPSRFSGSGSGTDYSLTINNLEQEDIATYFCQQGNTRPWTFGGGTKLEIK

SEQ ID NO: 6184 - protein, 239 aa, synthetic construct
EVQLVESGGGVVRPGGSLRLSCAASGFTFDDYGMSWVRQAPGKGLEWVSGINWNGGSTGYADSVKGRFTISRDNAKNSLYLQMNSLRAEDTAVYYCARGRSLLFDYWGQGTLVTVSRGGGGSGGGGSGGGGSSELTQDPAVSVALGQTVRITCQGDSLRSYYASWYQQKPGQAPVLVIYGKNNRPSGIPDRFSGSSSGNTASLTITGAQAEDEADYYCNSRDSSGNHVVFGGGTKLTVL

SEQ ID NO: 6185 - protein, 117 aa, synthetic construct
EVQLVESGGGVVRPGGSLRLSCAASGFTFDDYGMSWVRQAPGKGLEWVSGINWNGGSTGYADSVKGRFTISRDNAKNSLYLQMNSLRAEDTAVYYCARGRSLLFDYWGQGTLVTVSR

SEQ ID NO: 6186 - protein, 108 aa, synthetic construct
SSELTQDPAVSVALGQTVRITCQGDSLRSYYASWYQQKPGQAPVLVIYGKNNRPSGIPDRFSGSSSGNTASLTITGAQAEDEADYYCNSRDSSGNHVVFGGGTKLTVL

SEQ ID NO: 6187-7232 - skipped (1046 entries)

SEQ ID NO: 7233 - protein, 238 aa, synthetic construct
DLKVEMMAGGTQITPLNDNVTIFCNIFYSQPLNITSMGITWFWKSLTFDKEVKVFEFFGDHQEAFRPGAIVSPWRLKSGDASLRLPGIQLEEAGEYRCEVVVTPLKAQGTVQLEVVASPASRLLLDQVGMKENEDKYMCESSGFYPEAINITWEKQTQKFPHPIEISEDVITGPTIKNMDGTFNVTSCLKLNSSQEDPGTVYQCVVRHASLHTPLRSNFTLTAARHSLSETEKTDNFS

SEQ ID NO: 7234 - protein, 284 aa, synthetic construct
EPHSLRYNLTVLSWDGSVQSGFLTEVHLDGQPFLRCDRQKCRAKPQGQWAEDVLGNKTWDRETRDLTGNGKDLRMTLAHIKDQKEGLHSLQEIRVCEIHEDNSTRSSQHFYYDGELFLSQNLETKEWTMPQSSRAQTLAMNVRNFLKEDAMKTKTHYHAMHADCLQELRRYLKSGVVLRRTVPPMVNVTRSEASEGNITVTCRASGFYPWNITLSWRQDGVSLSHDTQQWGDVLPDGNGTYQTWVATRICQGEEQRFTCYMEHSGNHSTHPVPSGKVLVLQSHW

SEQ ID NO: 7235 - protein, 287 aa, synthetic construct
AEPHSLRYNLMVLSQDESVQSGFLAEGHLDGQPFLRYDRQKRRAKPQGQWAEDVLGAKTWDTETEDLTENGQDLRRTLTHIKDQKGGLHSLQEIRVCEIHEDSSTRGSRHFYYDGELFLSQNLETQESTVPQSSRAQTLAMNVTNFWKEDAMKTKTHYRAMQADCLQKLQRYLKSGVAIRRTVPPMVNVTCSEVSEGNITVTCRASSFYPRNITLTWRQDGVSLSHNTQQWGDVLPDGNGTYQTWVATRIRQGEEQRFTCYMEHSGNHGTHPVPSGKVLVLQSQRTD

SEQ ID NO: 7236 - protein, 191 aa, synthetic construct
GWVDTHCLCYDFIITPKSRPEPQWCEVQGLVDERPFLHYDCVNHKAKAFASLGKKVNVTKTWEEQTETLRDVVDFLKGQLLDIQVENLIPIEPLTLQARMSCEHEAHGHGRGSWQFLFNGQKFLLFDSNNRKWTALHPGAKKMTEKWEKNRDVTMFFQKISLGDCKMWLEEFLMYWEQMLDPTKPPSLAPG

SEQ ID NO: 7237 - protein, 329 aa, synthetic construct
QDVRVQVLPEVRGQLGGTVELPCHLLPPVPGLYISLVTWQRPDAPANHQNVAAFHPKMGPSFPSPKPGSERLSFVSAKQSTGQDTEAELQDATLALHGLTVEDEGNYTCEFATFPKGSVRGMTWLRVIAKPKNQAEAQKVTFSQDPTTVALCISKEGRPPARISWLSSLDWEAKETQVSGTLAGTVTVTSRFTLVPSGRADGVTVTCKVEHESFEEPALIPVTLSVRYPPEVSISGYDDNWYLGRTDATLSCDVRSNPEPTGYDWSTTSGTFPTSAVAQGSQLVIHAVDSLFNTTFVCTVTNAVGMGRAEQVIFVRETPNTAGAGATGG

SEQ ID NO: 7238 - protein, 323 aa, synthetic construct
WPPPGTGDVVVQAPTQVPGFLGDSVTLPCYLQVPNMEVTHVSQLTWARHGESGSMAVFHQTQGPSYSESKRLEFVAARLGAELRNASLRMFGLRVEDEGNYTCLFVTFPQGSRSVDIWLRVLAKPQNTAEVQKVQLTGEPVPMARCVSTGGRPPAQITWHSDLGGMPNTSQVPGFLSGTVTVTSLWILVPSSQVDGKNVTCKVEHESFEKPQLLTVNLTVYYPPEVSISGYDNNWYLGQNEATLTCDARSNPEPTGYNWSTTMGPLPPFAVAQGAQLLIRPVDKPINTTLICNVTNALGARQAELTVQVKEGPPSEHSGISRN

SEQ ID NO: 7239 - protein, 330 aa, synthetic construct
QNLFTKDVTVIEGEVATISCQVNKSDDSVIQLLNPNRQTIYFRDFRPLKDSRFQLLNFSSSELKVSLTNVSISDEGRYFCQLYTDPPQESYTTITVLVPPRNLMIDIQKDTAVEGEEIEVNCTAMASKPATTIRWFKGNTELKGKSEVEEWSDMYTVTSQLMLKVHKEDDGVPVICQVEHPAVTGNLQTQRYLEVQYKPQVHIQMTYPLQGLTREGDALELTCEAIGKPQPVMVTWVRVDDEMPQHAVLSGPNLFINNLNKTDNGTYRCEASNIVGKAHSDYMLYVYDPPTTIPPPTTTTTTTTTTTTTILTIITDSRAGEEGSIRAVDH

SEQ ID NO: 7240 - protein, 155 aa, synthetic construct
QRFAQAQQQLPLESLGWDVAELQLNHTGPQQDPRLYWQGGPALGRSFLHGPELDKGQLRIHRDGIYMVHIQVTLAICSSTTASRHHPTTLAVGICSPASRSISLLRLSFHQGCTIASQRLTPLARGDTLCTNLTGTLLPSRNTDETFFGVQWVRP

SEQ ID NO: 7241 - protein, 294 aa, synthetic construct
WTYHYSEKPMNWQRARRFCRDNYTDLVAIQNKAEIEYLEKTLPFSRSYYWIGIRKIGGIWTWVGTNKSLTEEAENWGDGEPNNKKNKEDCVEIYIKRNKDAGKWNDDACHKLKAALCYTASCQPWSCSGHGECVEIINNYTCNCDVGYYGPQCQFVIQCEPLEAPELGTMDCTHPLGNFSFSSQCAFSCSEGTNLTGIEETTCGPFGNWSSPEPTCQVIQCEPLSAPDLGIMNCSHPLASFSFTSACTFICSEGTELIGKKKTICESSGIWSNPSPICQKLDKSFSMIKEGDYN

SEQ ID NO: 7242 - protein, 243 aa, synthetic construct
RYLQVSQQLQQTNRVLEVTNSSLRQQLRLKITQLGQSAEDLQGSRRELAQSQEALQVEQRAHQAAEGQLQACQADRQKTKETLQSEEQQRRALEQKLSNMENRLKPFFTCGSADTCCPSGWIMHQKSCFYISLTSKNWQESQKQCETLSSKLATFSEIYPQSHSYYFLNSLLPNGGSGNSYWTGLSSNKDWKLTDDTQRTRTYAQSSKCNKVHKTWSWWTLESESCRSSLPYICEMTAFRFPD

SEQ ID NO: 7243 - protein, 124 aa, synthetic construct
KLTRDSQSLCPYDWIGFQNKCYYFSKEEGDWNSSKYNCSTQHADLTIIDNIEEMNFLRRYKCSSDHWIGLKMAKNRTGQWVDGATFTKSFGMRGSEGCAYLSDDGAATARCYTERKWICRKRIH

SEQ ID NO: 7244 - protein, 194 aa, synthetic construct
QGHLVHMTVVSGSNVTLNISESLPENYKQLTWFYTFDQKIVEWDSRKSKYFESKFKGRVRLDPQSGALYISKVQKEDNSTYIMRVLKKTGNEQEWKIKLQVLDPVPKPVIKIEKIEDMDDNCYLKLSCVIPGESVNYTWYGDKRPFPKELQNSVLETTLMPHNYSRCYTCQVSNSVSSKNGTVCLSPPCTLARS

SEQ ID NO: 7245 - protein, 133 aa, synthetic construct
QVSHRYPRIQSIKVQFTEYKKEKGFILTSQKEDEIMKVQNNSVIINCDGFYLISLKGYFSQEVNISLHYQKDEEPLFQLKKVRSVNSLMVASLTYKDKVYLNVTTDNTSLDDFHVNGGELILIHQNPGEFCVL

SEQ ID NO: 7246 - protein, 149 aa, synthetic construct
MQKGDQNPQIAAHVISEASSKTTSVLQWAEKGYYTMSNNLVTLENGKQLTVKRQGLYYIYAQVTFCSNREASSQAPFIASLCLKSPGRFERILLRAANTHSSAKPCGQQSIHLGGVFELQPGASVFVNVTDPSQVSHGTGFTSFGLLKL

SEQ ID NO: 7247 - protein, 205 aa, synthetic construct
ACPWAVSGARASPGSAASPRLREGPELSPDDPAGLLDLRQGMFAQLVAQNVLLIDGPLSWYSDPGLAGVSLTGGLSYKEDTKELVVAKAGVYYVFFQLELRRVVAGEGSGSVSLALHLQPLRSAAGAAALALTVDLPPASSEARNSAFGFQGRLLHLSAGQRLGVHLHTEARARHAWQLTQGATVLGLFRVTPEIPAGLPSPRSE

SEQ ID NO: 7248 - protein, 5 aa, synthetic construct
GGGGS

SEQ ID NO: 7249 - protein, 10 aa, synthetic construct
GGGGSGGGGS

SEQ ID NO: 7250 - protein, 15 aa, synthetic construct
GGGGSGGGGSGGGGS

SEQ ID NO: 7251 - protein, 17 aa, synthetic construct
DVPSGPGGGGGSGGGGS

SEQ ID NO: 7252 - protein, 14 aa, synthetic construct
AEAAAKEAAAKAAA

SEQ ID NO: 7253 - protein, 19 aa, synthetic construct
AEAAAKEAAAKEAAAKAAA

SEQ ID NO: 7254 - protein, 390 aa, Homo sapiens
MPPSGLRLLLLLLPLLWLLVLTPGRPAAGLSTCKTIDMELVKRKRIEAIRGQILSKLRLASPPSQGEVPPGPLPEAVLALYNSTRDRVAGESAEPEPEPEADYYAKEVTRVLMVETHNEIYDKFKQSTHSIYMFFNTSELREAVPEPVLLSRAELRLLRLKLKVEQHVELYQKYSNNSWRYLSNRLLAPSDSPEWLSFDVTGVVRQWLSRGGEIEGFRLSAHCSCDSRDNTLQVDINGFTTGRRGDLATIHGMNRPFLLLMATPLERAQHLQSSRHRRALDTNYCFSSTEKNCCVRQLYIDFRKDLGWKWIHEPKGYHANFCLGPCPYIWSLDTQYSKVLALYNQHNPGASAAPCCVPQALEPLPIVYYVGRKPKVEQLSNMIVRSCKCS

SEQ ID NO: 7255 - protein, 414 aa, Homo sapiens
MHYCVLSAFLILHLVTVALSLSTCSTLDMDQFMRKRIEAIRGQILSKLKLTSPPEDYPEPEEVPPEVISIYNSTRDLLQEKASRRAAACERERSDEEYYAKEVYKIDMPPFFPSENAIPPTFYRPYFRIVRFDVSAMEKNASNLVKAEFRVFRLQNPKARVPEQRIELYQILKSKDLTSPTQRYIDSKVVKTRAEGEWLSFDVTDAVHEWLHHKDRNLGFKISLHCPCCTFVPSNNYIIPNKSEELEARFAGIDGTSTYTSGDQKTIKSTRKKNSGKTPHLLLMLLPSYRLESQQTNRRKKRALDAAYCFRNVQDNCCLRPLYIDFKRDLGWKWIHEPKGYNANFCAGACPYLWSSDTQHSRVLSLYNTINPEASASPCCVSQDLEPLTILYYIGKTPKIEQLSNMIVKSCKCS

SEQ ID NO: 7256 - protein, 412 aa, Homo sapiens
MKMHLQRALVVLALLNFATVSLSLSTCTTLDFGHIKKKRVEAIRGQILSKLRLTSPPEPTVMTHVPYQVLALYNSTRELLEEMHGEREEGCTQENTESEYYAKEIHKFDMIQGLAEHNELAVCPKGITSKVFRFNVSSVEKNRTNLFRAEFRVLRVPNPSSKRNEQRIELFQILRPDEHIAKQRYIGGKNLPTRGTAEWLSFDVTDTVREWLLRRESNLGLEISIHCPCHTFQPNGDILENIHEVMEIKFKGVDNEDDHGRGDLGRLKKQKDHHNPHLILMMIPPHRLDNPGQGGQRKKRALDTNYCFRNLEENCCVRPLYIDFRQDLGWKWVHEPKGYYANFCSGPCPYLRSADTTHSTVLGLYNTLNPEASASPCCVPQDLEPLTILYYVGRTPKVEQLSNMVVKSCKCS

SEQ ID NO: 7257 - protein, 503 aa, Homo sapiens
MEAAVAAPRPRLLLLVLAAAAAAAAALLPGATALQCFCHLCTKDNFTCVTDGLCFVSVTETTDKVIHNSMCIAEIDLIPRDRPFVCAPSSKTGSVTTTYCCNQDHCNKIELPTTVKSSPGLGPVELAAVIAGPVCFVCISLMLMVYICHNRTVIHHRVPNEEDPSLDRPFISEGTTLKDLIYDMTTSGSGSGLPLLVQRTIARTIVLQESIGKGRFGEVWRGKWRGEEVAVKIFSSREERSWFREAEIYQTVMLRHENILGFIAADNKDNGTWTQLWLVSDYHEHGSLFDYLNRYTVTVEGMIKLALSTASGLAHLHMEIVGTQGKPAIAHRDLKSKNILVKKNGTCCIADLGLAVRHDSATDTIDIAPNHRVGTKRYMAPEVLDDSINMKHFESFKRADIYAMGLVFWEIARRCSIGGIHEDYQLPYYDLVPSDPSVEEMRKVVCEQKLRPNIPNRWQSCEALRVMAKIMRECWYANGAARLTALRIKKTLSQLSQQEGIKM

SEQ ID NO: 7258 - protein, 507 aa, Homo sapiens
MEAAVAAPRPRLLLLVLAAAAAAAAALLPGATALQCFCHLCTKDNFTCVTDGLCFVSVTETTDKVIHNSMCIAEIDLIPRDRPFVCAPSSKTGSVTTTYCCNQDHCNKIELPTTGPFSVKSSPGLGPVELAAVIAGPVCFVCISLMLMVYICHNRTVIHHRVPNEEDPSLDRPFISEGTTLKDLIYDMTTSGSGSGLPLLVQRTIARTIVLQESIGKGRFGEVWRGKWRGEEVAVKIFSSREERSWFREAEIYQTVMLRHENILGFIAADNKDNGTWTQLWLVSDYHEHGSLFDYLNRYTVTVEGMIKLALSTASGLAHLHMEIVGTQGKPAIAHRDLKSKNILVKKNGTCCIADLGLAVRHDSATDTIDIAPNHRVGTKRYMAPEVLDDSINMKHFESFKRADIYAMGLVFWEIARRCSIGGIHEDYQLPYYDLVPSDPSVEEMRKVVCEQKLRPNIPNRWQSCEALRVMAKIMRECWYANGAARLTALRIKKTLSQLSQQEGIKM

SEQ ID NO: 7259 - protein, 426 aa, Homo sapiens
MEAAVAAPRPRLLLLVLAAAAAAAAALLPGATALQCFCHLCTKDNFTCVTDGLCFVSVTETTDKVIHNSMCIAEIDLIPRDRPFVCAPSSKTGSVTTTYCCNQDHCNKIELPTTGLPLLVQRTIARTIVLQESIGKGRFGEVWRGKWRGEEVAVKIFSSREERSWFREAEIYQTVMLRHENILGFIAADNKDNGTWTQLWLVSDYHEHGSLFDYLNRYTVTVEGMIKLALSTASGLAHLHMEIVGTQGKPAIAHRDLKSKNILVKKNGTCCIADLGLAVRHDSATDTIDIAPNHRVGTKRYMAPEVLDDSINMKHFESFKRADIYAMGLVFWEIARRCSIGGIHEDYQLPYYDLVPSDPSVEEMRKVVCEQKLRPNIPNRWQSCEALRVMAKIMRECWYANGAARLTALRIKKTLSQLSQQEGIKM

SEQ ID NO: 7260 - protein, 567 aa, Homo sapiens
MGRGLLRGLWPLHIVLWTRIASTIPPHVQKSVNNDMIVTDNNGAVKFPQLCKFCDVRFSTCDNQKSCMSNCSITSICEKPQEVCVAVWRKNDENITLETVCHDPKLPYHDFILEDAASPKCIMKEKKKPGETFFMCSCSSDECNDNIIFSEEYNTSNPDLLLVIFQVTGISLLPPLGVAISVIIIFYCYRVNRQQKLSSTWETGKTRKLMEFSEHCAIILEDDRSDISSTCANNINHNTELLPIELDTLVGKGRFAEVYKAKLKQNTSEQFETVAVKIFPYEEYASWKTEKDIFSDINLKHENILQFLTAEERKTELGKQYWLITAFHAKGNLQEYLTRHVISWEDLRKLGSSLARGIAHLHSDHTPCGRPKMPIVHRDLKSSNILVKNDLTCCLCDFGLSLRLDPTLSVDDLANSGQVGTARYMAPEVLESRMNLENVESFKQTDVYSMALVLWEMTSRCNAVGEVKDYEPPFGSKVREHPCVESMKDNVLRDRGRPEIPSFWLNHQGIQMVCETLTECWDHDPEARLTAQCVAERFSELEHLDRLSGRSCSEEKIPEDGSLNTTK

SEQ ID NO: 7261 - protein, 592 aa, Homo sapiens
MGRGLLRGLWPLHIVLWTRIASTIPPHVQKSDVEMEAQKDEIICPSCNRTAHPLRHINNDMIVTDNNGAVKFPQLCKFCDVRFSTCDNQKSCMSNCSITSICEKPQEVCVAVWRKNDENITLETVCHDPKLPYHDFILEDAASPKCIMKEKKKPGETFFMCSCSSDECNDNIIFSEEYNTSNPDLLLVIFQVTGISLLPPLGVAISVIIIFYCYRVNRQQKLSSTWETGKTRKLMEFSEHCAIILEDDRSDISSTCANNINHNTELLPIELDTLVGKGRFAEVYKAKLKQNTSEQFETVAVKIFPYEEYASWKTEKDIFSDINLKHENILQFLTAEERKTELGKQYWLITAFHAKGNLQEYLTRHVISWEDLRKLGSSLARGIAHLHSDHTPCGRPKMPIVHRDLKSSNILVKNDLTCCLCDFGLSLRLDPTLSVDDLANSGQVGTARYMAPEVLESRMNLENVESFKQTDVYSMALVLWEMTSRCNAVGEVKDYEPPFGSKVREHPCVESMKDNVLRDRGRPEIPSFWLNHQGIQMVCETLTECWDHDPEARLTAQCVAERFSELEHLDRLSGRSCSEEKIPEDGSLNTTK

SEQ ID NO: 7262 - protein, 137 aa, Homo sapiens
TIPPHVQKSVNNDMIVTDNNGAVKFPQLCKFCDVRFSTCDNQKSCMSNCSITSICEKPQEVCVAVWRKNDENITLETVCHDPKLPYHDFILEDAASPKCIMKEKKKPGETFFMCSCSSDECNDNIIFSEEYNTSNPD

SEQ ID NO: 7263 - protein, 136 aa, Homo sapiens
IPPHVQKSVNNDMIVTDNNGAVKFPQLCKFCDVRFSTCDNQKSCMSNCSITSICEKPQEVCVAVWRKNDENITLETVCHDPKLPYHDFILEDAASPKCIMKEKKKPGETFFMCSCSSDECNDNIIFSEEYNTSNPD

SEQ ID NO: 7264 - protein, 162 aa, Homo sapiens
TIPPHVQKSDVEMEAQKDEIICPSCNRTAHPLRHINNDMIVTDNNGAVKFPQLCKFCDVRFSTCDNQKSCMSNCSITSICEKPQEVCVAVWRKNDENITLETVCHDPKLPYHDFILEDAASPKCIMKEKKKPGETFFMCSCSSDECNDNIIFSEEYNTSNPD

SEQ ID NO: 7265 - protein, 101 aa, Homo sapiens
QLCKFCDVRFSTCDNQKSCMSNCSITSICEKPQEVCVAVWRKNDENITLETVCHDPKLPYHDFILEDAASPKCIMKEKKKPGETFFMCSCSSDECNDNIIF

SEQ ID NO: 7266 - protein, 93 aa, Homo sapiens
LQCFCHLCTKDNFTCVTDGLCFVSVTETTDKVIHNSMCIAEIDLIPRDRPFVCAPSSKTGSVTTTYCCNQDHCNKIELPTTVKSSPGLGPVEL

SEQ ID NO: 7267 - protein, 79 aa, Homo sapiens
ALQCFCHLCTKDNFTCVTDGLCFVSVTETTDKVIHNSMCIAEIDLIPRDRPFVCAPSSKTGSVTTTYCCNQDHCNKIEL

SEQ ID NO: 7268 - protein, 851 aa, Homo sapiens
MTSHYVIAIFALMSSCLATAGPEPGALCELSPVSASHPVQALMESFTVLSGCASRGTTGLPQEVHVLNLRTAGQGPGQLQREVTLHLNPISSVHIHHKSVVFLLNSPHPLVWHLKTERLATGVSRLFLVSEGSVVQFSSANFSLTAETEERNFPHGNEHLLNWARKEYGAVTSFTELKIARNIYIKVGEDQVFPPKCNIGKNFLSLNYLAEYLQPKAAEGCVMSSQPQNEEVHIIELITPNSNPYSAFQVDITIDIRPSQEDLEVVKNLILILKCKKSVNWVIKSFDVKGSLKIIAPNSIGFGKESERSMTMTKSIRDDIPSTQGNLVKWALDNGYSPITSYTMAPVANRFHLRLENNAEEMGDEEVHTIPPELRILLDPGALPALQNPPIRGGEGQNGGLPFPFPDISRRVWNEEGEDGLPRPKDPVIPSIQLFPGLREPEEVQGSVDIALSVKCDNEKMIVAVEKDSFQASGYSGMDVTLLDPTCKAKMNGTHFVLESPLNGCGTRPRWSALDGVVYYNSIVIQVPALGDSSGWPDGYEDLESGDNGFPGDMDEGDASLFTRPEIVVFNCSLQQVRNPSSFQEQPHGNITFNMELYNTDLFLVPSQGVFSVPENGHVYVEVSVTKAEQELGFAIQTCFISPYSNPDRMSHYTIIENICPKDESVKFYSPKRVHFPIPQADMDKKRFSFVFKPVFNTSLLFLQCELTLCTKMEKHPQKLPKCVPPDEACTSLDASIIWAMMQNKKTFTKPLAVIHHEAESKEKGPSMKEPNPISPPIFHGLDTLTVMGIAFAAFVIGALLTGALWYIYSHTGETAGRQQVPTSPPASENSSAAHSIGSTQSTPCSSSSTA

SEQ ID NO: 7269 - protein, 850 aa, Homo sapiens
MTSHYVIAIFALMSSCLATAGPEPGALCELSPVSASHPVQALMESFTVLSGCASRGTTGLPQEVHVLNLRTAGQGPGQLQREVTLHLNPISSVHIHHKSVVFLLNSPHPLVWHLKTERLATGVSRLFLVSEGSVVQFSSANFSLTAETEERNFPHGNEHLLNWARKEYGAVTSFTELKIARNIYIKVGEDQVFPPKCNIGKNFLSLNYLAEYLQPKAAEGCVMSSQPQNEEVHIIELITPNSNPYSAFQVDITIDIRPSQEDLEVVKNLILILKCKKSVNWVIKSFDVKGSLKIIAPNSIGFGKESERSMTMTKSIRDDIPSTQGNLVKWALDNGYSPITSYTMAPVANRFHLRLENNEEMGDEEVHTIPPELRILLDPGALPALQNPPIRGGEGQNGGLPFPFPDISRRVWNEEGEDGLPRPKDPVIPSIQLFPGLREPEEVQGSVDIALSVKCDNEKMIVAVEKDSFQASGYSGMDVTLLDPTCKAKMNGTHFVLESPLNGCGTRPRWSALDGVVYYNSIVIQVPALGDSSGWPDGYEDLESGDNGFPGDMDEGDASLFTRPEIVVFNCSLQQVRNPSSFQEQPHGNITFNMELYNTDLFLVPSQGVFSVPENGHVYVEVSVTKAEQELGFAIQTCFISPYSNPDRMSHYTIIENICPKDESVKFYSPKRVHFPIPQADMDKKRFSFVFKPVFNTSLLFLQCELTLCTKMEKHPQKLPKCVPPDEACTSLDASIIWAMMQNKKTFTKPLAVIHHEAESKEKGPSMKEPNPISPPIFHGLDTLTVMGIAFAAFVIGALLTGALWYIYSHTGETAGRQQVPTSPPASENSSAAHSIGSTQSTPCSSSSTA

SEQ ID NO: 7270 - protein, 767 aa, Homo sapiens
GPEPGALCELSPVSASHPVQALMESFTVLSGCASRGTTGLPQEVHVLNLRTAGQGPGQLQREVTLHLNPISSVHIHHKSVVFLLNSPHPLVWHLKTERLATGVSRLFLVSEGSVVQFSSANFSLTAETEERNFPHGNEHLLNWARKEYGAVTSFTELKIARNIYIKVGEDQVFPPKCNIGKNFLSLNYLAEYLQPKAAEGCVMSSQPQNEEVHIIELITPNSNPYSAFQVDITIDIRPSQEDLEVVKNLILILKCKKSVNWVIKSFDVKGSLKIIAPNSIGFGKESERSMTMTKSIRDDIPSTQGNLVKWALDNGYSPITSYTMAPVANRFHLRLENNAEEMGDEEVHTIPPELRILLDPGALPALQNPPIRGGEGQNGGLPFPFPDISRRVWNEEGEDGLPRPKDPVIPSIQLFPGLREPEEVQGSVDIALSVKCDNEKMIVAVEKDSFQASGYSGMDVTLLDPTCKAKMNGTHFVLESPLNGCGTRPRWSALDGVVYYNSIVIQVPALGDSSGWPDGYEDLESGDNGFPGDMDEGDASLFTRPEIVVFNCSLQQVRNPSSFQEQPHGNITFNMELYNTDLFLVPSQGVFSVPENGHVYVEVSVTKAEQELGFAIQTCFISPYSNPDRMSHYTIIENICPKDESVKFYSPKRVHFPIPQADMDKKRFSFVFKPVFNTSLLFLQCELTLCTKMEKHPQKLPKCVPPDEACTSLDASIIWAMMQNKKTFTKPLAVIHHEAESKEKGPSMKEPNPISPPIFHGLDTLTV

SEQ ID NO: 7271 - protein, 361 aa, Homo sapiens
LSTCKTIDMELVKRKRIEAIRGQILSKLRLASPPSQGEVPPGPLPEAVLALYNSTRDRVAGESAEPEPEPEADYYAKEVTRVLMVETHNEIYDKFKQSTHSIYMFFNTSELREAVPEPVLLSRAELRLLRLKLKVEQHVELYQKYSNNSWRYLSNRLLAPSDSPEWLSFDVTGVVRQWLSRGGEIEGFRLSAHCSCDSRDNTLQVDINGFTTGRRGDLATIHGMNRPFLLLMATPLERAQHLQSSRHRRALDTNYCFSSTEKNCCVRQLYIDFRKDLGWKWIHEPKGYHANFCLGPCPYIWSLDTQYSKVLALYNQHNPGASAAPCCVPQALEPLPIVYYVGRKPKVEQLSNMIVRSCKCS

SEQ ID NO: 7272 - protein, 394 aa, Homo sapiens
LSTCSTLDMDQFMRKRIEAIRGQILSKLKLTSPPEDYPEPEEVPPEVISIYNSTRDLLQEKASRRAAACERERSDEEYYAKEVYKIDMPPFFPSENAIPPTFYRPYFRIVRFDVSAMEKNASNLVKAEFRVFRLQNPKARVPEQRIELYQILKSKDLTSPTQRYIDSKVVKTRAEGEWLSFDVTDAVHEWLHHKDRNLGFKISLHCPCCTFVPSNNYIIPNKSEELEARFAGIDGTSTYTSGDQKTIKSTRKKNSGKTPHLLLMLLPSYRLESQQTNRRKKRALDAAYCFRNVQDNCCLRPLYIDFKRDLGWKWIHEPKGYNANFCAGACPYLWSSDTQHSRVLSLYNTINPEASASPCCVSQDLEPLTILYYIGKTPKIEQLSNMIVKSCKCS

SEQ ID NO: 7273 - protein, 389 aa, Homo sapiens
LSTCTTLDFGHIKKKRVEAIRGQILSKLRLTSPPEPTVMTHVPYQVLALYNSTRELLEEMHGEREEGCTQENTESEYYAKEIHKFDMIQGLAEHNELAVCPKGITSKVFRFNVSSVEKNRTNLFRAEFRVLRVPNPSSKRNEQRIELFQILRPDEHIAKQRYIGGKNLPTRGTAEWLSFDVTDTVREWLLRRESNLGLEISIHCPCHTFQPNGDILENIHEVMEIKFKGVDNEDDHGRGDLGRLKKQKDHHNPHLILMMIPPHRLDNPGQGGQRKKRALDTNYCFRNLEENCCVRPLYIDFRQDLGWKWVHEPKGYYANFCSGPCPYLRSADTTHSTVLGLYNTLNPEASASPCCVPQDLEPLTILYYVGRTPKVEQLSNMVVKSCKCS

SEQ ID NO: 7274 - protein, 470 aa, Homo sapiens
LQCFCHLCTKDNFTCVTDGLCFVSVTETTDKVIHNSMCIAEIDLIPRDRPFVCAPSSKTGSVTTTYCCNQDHCNKIELPTTVKSSPGLGPVELAAVIAGPVCFVCISLMLMVYICHNRTVIHHRVPNEEDPSLDRPFISEGTTLKDLIYDMTTSGSGSGLPLLVQRTIARTIVLQESIGKGRFGEVWRGKWRGEEVAVKIFSSREERSWFREAEIYQTVMLRHENILGFIAADNKDNGTWTQLWLVSDYHEHGSLFDYLNRYTVTVEGMIKLALSTASGLAHLHMEIVGTQGKPAIAHRDLKSKNILVKKNGTCCIADLGLAVRHDSATDTIDIAPNHRVGTKRYMAPEVLDDSINMKHFESFKRADIYAMGLVFWEIARRCSIGGIHEDYQLPYYDLVPSDPSVEEMRKVVCEQKLRPNIPNRWQSCEALRVMAKIMRECWYANGAARLTALRIKKTLSQLSQQEGIKM

SEQ ID NO: 7275 - protein, 474 aa, Homo sapiens
LQCFCHLCTKDNFTCVTDGLCFVSVTETTDKVIHNSMCIAEIDLIPRDRPFVCAPSSKTGSVTTTYCCNQDHCNKIELPTTGPFSVKSSPGLGPVELAAVIAGPVCFVCISLMLMVYICHNRTVIHHRVPNEEDPSLDRPFISEGTTLKDLIYDMTTSGSGSGLPLLVQRTIARTIVLQESIGKGRFGEVWRGKWRGEEVAVKIFSSREERSWFREAEIYQTVMLRHENILGFIAADNKDNGTWTQLWLVSDYHEHGSLFDYLNRYTVTVEGMIKLALSTASGLAHLHMEIVGTQGKPAIAHRDLKSKNILVKKNGTCCIADLGLAVRHDSATDTIDIAPNHRVGTKRYMAPEVLDDSINMKHFESFKRADIYAMGLVFWEIARRCSIGGIHEDYQLPYYDLVPSDPSVEEMRKVVCEQKLRPNIPNRWQSCEALRVMAKIMRECWYANGAARLTALRIKKTLSQLSQQEGIKM

SEQ ID NO: 7276 - protein, 393 aa, Homo sapiens
LQCFCHLCTKDNFTCVTDGLCFVSVTETTDKVIHNSMCIAEIDLIPRDRPFVCAPSSKTGSVTTTYCCNQDHCNKIELPTTGLPLLVQRTIARTIVLQESIGKGRFGEVWRGKWRGEEVAVKIFSSREERSWFREAEIYQTVMLRHENILGFIAADNKDNGTWTQLWLVSDYHEHGSLFDYLNRYTVTVEGMIKLALSTASGLAHLHMEIVGTQGKPAIAHRDLKSKNILVKKNGTCCIADLGLAVRHDSATDTIDIAPNHRVGTKRYMAPEVLDDSINMKHFESFKRADIYAMGLVFWEIARRCSIGGIHEDYQLPYYDLVPSDPSVEEMRKVVCEQKLRPNIPNRWQSCEALRVMAKIMRECWYANGAARLTALRIKKTLSQLSQQEGIKM

SEQ ID NO: 7277 - protein, 545 aa, Homo sapiens
TIPPHVQKSVNNDMIVTDNNGAVKFPQLCKFCDVRFSTCDNQKSCMSNCSITSICEKPQEVCVAVWRKNDENITLETVCHDPKLPYHDFILEDAASPKCIMKEKKKPGETFFMCSCSSDECNDNIIFSEEYNTSNPDLLLVIFQVTGISLLPPLGVAISVIIIFYCYRVNRQQKLSSTWETGKTRKLMEFSEHCAIILEDDRSDISSTCANNINHNTELLPIELDTLVGKGRFAEVYKAKLKQNTSEQFETVAVKIFPYEEYASWKTEKDIFSDINLKHENILQFLTAEERKTELGKQYWLITAFHAKGNLQEYLTRHVISWEDLRKLGSSLARGIAHLHSDHTPCGRPKMPIVHRDLKSSNILVKNDLTCCLCDFGLSLRLDPTLSVDDLANSGQVGTARYMAPEVLESRMNLENVESFKQTDVYSMALVLWEMTSRCNAVGEVKDYEPPFGSKVREHPCVESMKDNVLRDRGRPEIPSFWLNHQGIQMVCETLTECWDHDPEARLTAQCVAERFSELEHLDRLSGRSCSEEKIPEDGSLNTTK

SEQ ID NO: 7278 - protein, 570 aa, Homo sapiens
TIPPHVQKSDVEMEAQKDEIICPSCNRTAHPLRHINNDMIVTDNNGAVKFPQLCKFCDVRFSTCDNQKSCMSNCSITSICEKPQEVCVAVWRKNDENITLETVCHDPKLPYHDFILEDAASPKCIMKEKKKPGETFFMCSCSSDECNDNIIFSEEYNTSNPDLLLVIFQVTGISLLPPLGVAISVIIIFYCYRVNRQQKLSSTWETGKTRKLMEFSEHCAIILEDDRSDISSTCANNINHNTELLPIELDTLVGKGRFAEVYKAKLKQNTSEQFETVAVKIFPYEEYASWKTEKDIFSDINLKHENILQFLTAEERKTELGKQYWLITAFHAKGNLQEYLTRHVISWEDLRKLGSSLARGIAHLHSDHTPCGRPKMPIVHRDLKSSNILVKNDLTCCLCDFGLSLRLDPTLSVDDLANSGQVGTARYMAPEVLESRMNLENVESFKQTDVYSMALVLWEMTSRCNAVGEVKDYEPPFGSKVREHPCVESMKDNVLRDRGRPEIPSFWLNHQGIQMVCETLTECWDHDPEARLTAQCVAERFSELEHLDRLSGRSCSEEKIPEDGSLNTTK

SEQ ID NO: 7279 - protein, 831 aa, Homo sapiens
GPEPGALCELSPVSASHPVQALMESFTVLSGCASRGTTGLPQEVHVLNLRTAGQGPGQLQREVTLHLNPISSVHIHHKSVVFLLNSPHPLVWHLKTERLATGVSRLFLVSEGSVVQFSSANFSLTAETEERNFPHGNEHLLNWARKEYGAVTSFTELKIARNIYIKVGEDQVFPPKCNIGKNFLSLNYLAEYLQPKAAEGCVMSSQPQNEEVHIIELITPNSNPYSAFQVDITIDIRPSQEDLEVVKNLILILKCKKSVNWVIKSFDVKGSLKIIAPNSIGFGKESERSMTMTKSIRDDIPSTQGNLVKWALDNGYSPITSYTMAPVANRFHLRLENNAEEMGDEEVHTIPPELRILLDPGALPALQNPPIRGGEGQNGGLPFPFPDISRRVWNEEGEDGLPRPKDPVIPSIQLFPGLREPEEVQGSVDIALSVKCDNEKMIVAVEKDSFQASGYSGMDVTLLDPTCKAKMNGTHFVLESPLNGCGTRPRWSALDGVVYYNSIVIQVPALGDSSGWPDGYEDLESGDNGFPGDMDEGDASLFTRPEIVVFNCSLQQVRNPSSFQEQPHGNITFNMELYNTDLFLVPSQGVFSVPENGHVYVEVSVTKAEQELGFAIQTCFISPYSNPDRMSHYTIIENICPKDESVKFYSPKRVHFPIPQADMDKKRFSFVFKPVFNTSLLFLQCELTLCTKMEKHPQKLPKCVPPDEACTSLDASIIWAMMQNKKTFTKPLAVIHHEAESKEKGPSMKEPNPISPPIFHGLDTLTVMGIAFAAFVIGALLTGALWYIYSHTGETAGRQQVPTSPPASENSSAAHSIGSTQSTPCSSSSTA

SEQ ID NO: 7280 - protein, 830 aa, Homo sapiens
GPEPGALCELSPVSASHPVQALMESFTVLSGCASRGTTGLPQEVHVLNLRTAGQGPGQLQREVTLHLNPISSVHIHHKSVVFLLNSPHPLVWHLKTERLATGVSRLFLVSEGSVVQFSSANFSLTAETEERNFPHGNEHLLNWARKEYGAVTSFTELKIARNIYIKVGEDQVFPPKCNIGKNFLSLNYLAEYLQPKAAEGCVMSSQPQNEEVHIIELITPNSNPYSAFQVDITIDIRPSQEDLEVVKNLILILKCKKSVNWVIKSFDVKGSLKIIAPNSIGFGKESERSMTMTKSIRDDIPSTQGNLVKWALDNGYSPITSYTMAPVANRFHLRLENNEEMGDEEVHTIPPELRILLDPGALPALQNPPIRGGEGQNGGLPFPFPDISRRVWNEEGEDGLPRPKDPVIPSIQLFPGLREPEEVQGSVDIALSVKCDNEKMIVAVEKDSFQASGYSGMDVTLLDPTCKAKMNGTHFVLESPLNGCGTRPRWSALDGVVYYNSIVIQVPALGDSSGWPDGYEDLESGDNGFPGDMDEGDASLFTRPEIVVFNCSLQQVRNPSSFQEQPHGNITFNMELYNTDLFLVPSQGVFSVPENGHVYVEVSVTKAEQELGFAIQTCFISPYSNPDRMSHYTIIENICPKDESVKFYSPKRVHFPIPQADMDKKRFSFVFKPVFNTSLLFLQCELTLCTKMEKHPQKLPKCVPPDEACTSLDASIIWAMMQNKKTFTKPLAVIHHEAESKEKGPSMKEPNPISPPIFHGLDTLTVMGIAFAAFVIGALLTGALWYIYSHTGETAGRQQVPTSPPASENSSAAHSIGSTQSTPCSSSSTA

SEQ ID NO: 7281 - protein, 481 aa, synthetic construct
  VARIANT 330: note = May be deleted
ASTKGPSVFPLAPSSKSTSGGTAALGCLVKDYFPEPVTVSWNSGALTSGVHTFPAVLQSSGLYSLSSVVTVPSSSLGTQTYICNVNHKPSNTKVDKRVEPKSCDKTHTCPPCPAPELLGGPSVFLFPPKPKDTLMISRTPEVTCVVVDVSHEDPEVKFNWYVDGVEVHNAKTKPREEQYNSTYRVVSVLTVLHQDWLNGKEYKCKVSNKALPAPIEKTISKAKGQPREPQVCTLPPSREEMTKNQVSLSCAVKGFYPSDIAVEWESNGQPENNYKTTPPVLDSDGSFFLVSKLTVDKSRWQQGNVFSCSVMHEALHNHYTQKSLSLSPGKGGGGSGGGGSGGGGSIPPHVQKSVNNDMIVTDNNGAVKFPQLCKFCDVRFSTCDNQKSCMSNCSITSICEKPQEVCVAVWRKNDENITLETVCHDPKLPYHDFILEDAASPKCIMKEKKKPGETFFMCSCSSDECNDNIIFSEEYNTSNPD

SEQ ID NO: 7282 - protein, 481 aa, synthetic construct
  VARIANT 330: note = May be deleted
ASTKGPSVFPLAPSSKSTSGGTAALGCLVKDYFPEPVTVSWNSGALTSGVHTFPAVLQSSGLYSLSSVVTVPSSSLGTQTYICNVNHKPSNTKVDKRVEPKSCDKTHTCPPCPAPELLGGPSVFLFPPKPKDTLMISRTPEVTCVVVDVSHEDPEVKFNWYVDGVEVHNAKTKPREEQYNSTYRVVSVLTVLHQDWLNGKEYKCKVSNKALPAPIEKTISKAKGQPREPQVYTLPPCREEMTKNQVSLWCLVKGFYPSDIAVEWESNGQPENNYKTTPPVLDSDGSFFLYSKLTVDKSRWQQGNVFSCSVMHEALHNHYTQKSLSLSPGKGGGGSGGGGSGGGGSIPPHVQKSVNNDMIVTDNNGAVKFPQLCKFCDVRFSTCDNQKSCMSNCSITSICEKPQEVCVAVWRKNDENITLETVCHDPKLPYHDFILEDAASPKCIMKEKKKPGETFFMCSCSSDECNDNIIFSEEYNTSNPD

SEQ ID NO: 7283 - protein, 378 aa, synthetic construct
  VARIANT 227: note = May be deleted
DKTHTCPPCPAPELLGGPSVFLFPPKPKDTLMISRTPEVTCVVVDVSHEDPEVKFNWYVDGVEVHNAKTKPREEQYNSTYRVVSVLTVLHQDWLNGKEYKCKVSNKALPAPIEKTISKAKGQPREPQVCTLPPSREEMTKNQVSLSCAVKGFYPSDIAVEWESNGQPENNYKTTPPVLDSDGSFFLVSKLTVDKSRWQQGNVFSCSVMHEALHNHYTQKSLSLSPGKGGGGSGGGGSGGGGSIPPHVQKSVNNDMIVTDNNGAVKFPQLCKFCDVRFSTCDNQKSCMSNCSITSICEKPQEVCVAVWRKNDENITLETVCHDPKLPYHDFILEDAASPKCIMKEKKKPGETFFMCSCSSDECNDNIIFSEEYNTSNPD

SEQ ID NO: 7284 - protein, 378 aa, synthetic construct
  VARIANT 227: note = May be deleted
DKTHTCPPCPAPELLGGPSVFLFPPKPKDTLMISRTPEVTCVVVDVSHEDPEVKFNWYVDGVEVHNAKTKPREEQYNSTYRVVSVLTVLHQDWLNGKEYKCKVSNKALPAPIEKTISKAKGQPREPQVYTLPPCREEMTKNQVSLWCLVKGFYPSDIAVEWESNGQPENNYKTTPPVLDSDGSFFLYSKLTVDKSRWQQGNVFSCSVMHEALHNHYTQKSLSLSPGKGGGGSGGGGSGGGGSIPPHVQKSVNNDMIVTDNNGAVKFPQLCKFCDVRFSTCDNQKSCMSNCSITSICEKPQEVCVAVWRKNDENITLETVCHDPKLPYHDFILEDAASPKCIMKEKKKPGETFFMCSCSSDECNDNIIFSEEYNTSNPD

SEQ ID NO: 7285 - protein, 481 aa, synthetic construct
  VARIANT 481: note = May be deleted
IPPHVQKSVNNDMIVTDNNGAVKFPQLCKFCDVRFSTCDNQKSCMSNCSITSICEKPQEVCVAVWRKNDENITLETVCHDPKLPYHDFILEDAASPKCIMKEKKKPGETFFMCSCSSDECNDNIIFSEEYNTSNPDGGGGSGGGGSGGGGSASTKGPSVFPLAPSSKSTSGGTAALGCLVKDYFPEPVTVSWNSGALTSGVHTFPAVLQSSGLYSLSSVVTVPSSSLGTQTYICNVNHKPSNTKVDKRVEPKSCDKTHTCPPCPAPELLGGPSVFLFPPKPKDTLMISRTPEVTCVVVDVSHEDPEVKFNWYVDGVEVHNAKTKPREEQYNSTYRVVSVLTVLHQDWLNGKEYKCKVSNKALPAPIEKTISKAKGQPREPQVCTLPPSREEMTKNQVSLSCAVKGFYPSDIAVEWESNGQPENNYKTTPPVLDSDGSFFLVSKLTVDKSRWQQGNVFSCSVMHEALHNHYTQKSLSLSPGK

SEQ ID NO: 7286 - protein, 481 aa, synthetic construct
  VARIANT 481: note = May be deleted
IPPHVQKSVNNDMIVTDNNGAVKFPQLCKFCDVRFSTCDNQKSCMSNCSITSICEKPQEVCVAVWRKNDENITLETVCHDPKLPYHDFILEDAASPKCIMKEKKKPGETFFMCSCSSDECNDNIIFSEEYNTSNPDGGGGSGGGGSGGGGSASTKGPSVFPLAPSSKSTSGGTAALGCLVKDYFPEPVTVSWNSGALTSGVHTFPAVLQSSGLYSLSSVVTVPSSSLGTQTYICNVNHKPSNTKVDKRVEPKSCDKTHTCPPCPAPELLGGPSVFLFPPKPKDTLMISRTPEVTCVVVDVSHEDPEVKFNWYVDGVEVHNAKTKPREEQYNSTYRVVSVLTVLHQDWLNGKEYKCKVSNKALPAPIEKTISKAKGQPREPQVYTLPPCREEMTKNQVSLWCLVKGFYPSDIAVEWESNGQPENNYKTTPPVLDSDGSFFLYSKLTVDKSRWQQGNVFSCSVMHEALHNHYTQKSLSLSPGK

SEQ ID NO: 7287 - protein, 257 aa, synthetic construct
IPPHVQKSVNNDMIVTDNNGAVKFPQLCKFCDVRFSTCDNQKSCMSNCSITSICEKPQEVCVAVWRKNDENITLETVCHDPKLPYHDFILEDAASPKCIMKEKKKPGETFFMCSCSSDECNDNIIFSEEYNTSNPDGGGGSGGGGSGGGGSGQPKANPTVTLFPPSSEELQANKATLVCLISDFYPGAVTVAWKADGSPVKAGVETTKPSKQSNNKYAASSYLSLTPEQWKSHRSYSCQVTHEGSTVEKTVAPTECS

SEQ ID NO: 7288 - protein, 258 aa, synthetic construct
IPPHVQKSVNNDMIVTDNNGAVKFPQLCKFCDVRFSTCDNQKSCMSNCSITSICEKPQEVCVAVWRKNDENITLETVCHDPKLPYHDFILEDAASPKCIMKEKKKPGETFFMCSCSSDECNDNIIFSEEYNTSNPDGGGGSGGGGSGGGGSRTVAAPSVFIFPPSDEQLKSGTASVVCLLNNFYPREAKVQWKVDNALQSGNSQESVTEQDSKDSTYSLSSTLTLSKADYEKHKVYACEVTHQGLSSPVTKSFNRGEC

SEQ ID NO: 7289-7290 - skipped (2 entries)

SEQ ID NO: 7291 - protein, 27 aa, synthetic construct
  VARIANT 12..26: note = EAAAK repeats may be deleted
AEAAAKEAAAKEAAAKEAAAKEAAAKA

SEQ ID NO: 7292 - protein, 32 aa, synthetic construct
GIPDQFSGSNSGNIATLTISKAQAGYEADYYC

SEQ ID NO: 7293 - protein, 10 aa, synthetic construct
QSWDSTNSAV

SEQ ID NO: 7294 - protein, 107 aa, synthetic construct
SYTLTQPPLLSVALGHKATITCSGERLSDKYVHWYQQKPGRAPVMVIYENDKRPSGIPDQFSGSNSGNIATLTISKAQAGYEADYYCQSWDSTNSAVFGSGTQLTVL

SEQ ID NO: 7295 - protein, 118 aa, synthetic construct
QIQLQESGPGLVKPSQSLSLSCSVTGFSINTGGYHWNWIRQFPGKKVEWMGYIYSSGTTKYNPSLKSRISITRDTSKNQFFLQLNSVTTEDTATYYCARGDWHYFDYWGQGTMVAVSS

SEQ ID NO: 7296 - protein, 107 aa, synthetic construct
SYTLTQPPLVSVALGQKATIICSGENLSDKYVHWYQQKPGRAPVMVIYENDKRPSGIPDQFSGSNSGNIATLTISKAQAGYEADYYCHCWDSTNSAVFGSGTHLTVL

SEQ ID NO: 7297 - protein, 118 aa, synthetic construct
QIQLQESGPGLVKPSQSLSLTCSVTGFSINTGGYHWNWIRQFPGKKLEWMGYIYSSGSTRYNPSLKSRFSITRDTSKNQFFLQLNSVTTEDTATYYCTRGNWHYFDYWGQGTLVAVSS

SEQ ID NO: 7298 - protein, 118 aa, synthetic construct
QIQLQESGPGLVKPSQSLSLSCSVTGFSITTTGYHWNWIRQFPGKKLEWMGYIYSSGSTSYNPSLKSRFSITRDTSKNQFFLQLNSVTTEDTATYYCARGDWHYFDYWGPGTMVTVSS

SEQ ID NO: 7299 - protein, 107 aa, synthetic construct
SFTLTQPPLVSVAVGQVATITCSGEKLSDKYVHWYQQKPGRAPVMVIYENDRRPSGIPDQFSGSNSGNIASLTISKAQAGDEADYFCQFWDSTNSAVFGGGTQLTVL

SEQ ID NO: 7300 - protein, 118 aa, synthetic construct
QIQLQESGPGLVKPSQTLSLTCTVSGFSITTTGYHWNWIRQHPGKGLEWIGYIYSSGSTSYNPSLKSLVTISRDTSKNQFSLKLSSVTAADTAVYYCARGDWHYFDYWGQGTMVTVSS

SEQ ID NO: 7301 - protein, 118 aa, synthetic construct
QIQLVESGGGLVKPGGSLRLSCAVSGFSITTTGYHWNWIRQAPGKGLEWVGYIYSSGSTSYNPSLKSRFTISRDTAKNSFYLQMNSLRAEDTAVYYCARGDWHYFDYWGQGTMVTVSS

SEQ ID NO: 7302 - protein, 118 aa, synthetic construct
EIQLLESGGGLVQPGGSLRLSCAVSGFSITTTGYHWNWVRQAPGKGLEWVGYIYSSGSTSYNPSLKSRFTISRDTSKNTFYLQMNSLRAEDTAVYYCARGDWHYFDYWGQGTMVTVSS

SEQ ID NO: 7303 - protein, 118 aa, synthetic construct
EIQLVESGGGLVQPGGSLRLSCAVSGFSITTTGYHWNWVRQAPGKGLEWVGYIYSSGSTSYNPSLKSRFTISRDTAKNSFYLQMNSLRAEDTAVYYCARGDWHYFDYWGQGTMVTVSS

SEQ ID NO: 7304 - protein, 118 aa, synthetic construct
QIQLVQSGAEVKKPGASVKVSCKVSGFSITTTGYHWNWVRQAPGQGLEWMGYIYSSGSTSYNPSLKSRVTMTRDTSTNTFYMELSSLRSEDTAVYYCARGDWHYFDYWGQGTMVTVSS

SEQ ID NO: 7305 - protein, 107 aa, synthetic construct
SSETTQPPSVSVSPGQTASITCSGEKLSDKYVHWYQQKPGQSPVMVIYENDRRPSGIPERFSGSNSGNTATLTISGTQAMDEADYFCQFWDSTNSAVFGGGTQLTVL

SEQ ID NO: 7306 - protein, 107 aa, synthetic construct
SSETTQPHSVSVATAQMARITCSGEKLSDKYVHWYQQKPGQDPVMVIYENDRRPSGIPERFSGSNPGNTATLTISRIEAGDEADYFCQFWDSTNSAVFGGGTQLTVL

SEQ ID NO: 7307 - protein, 107 aa, synthetic construct
QSVTTQPPSASGTPGQRVTISCSGEKLSDKYVHWYQQLPGTAPKMLIYENDRRPSGVPDRFSGSNSGNSASLAISGLRSEDEADYFCQFWDSTNSAVFGGGTQLTVL

SEQ ID NO: 7308 - protein, 107 aa, synthetic construct
QSVTTQPPSVSGAPGQRVTISCSGEKLSDKYVHWYQQLPGTAPKMLIYENDRRPSGVPDRFSGSNSGNSASLAITGLQAEDEADYFCQFWDSTNSAVFGGGTQLTVL

SEQ ID NO: 7309 - protein, 108 aa, synthetic construct
DSVTTQSPLSLPVTLGQPASISCSGEKLSDKYVHWYQQRPGQSPRMLIYENDRRPSGVPDRFSGSNSGNDATLKISRVEAEDVGVYFCQFWDSTNSAVFGGGTKVEIK

SEQ ID NO: 7310 - protein, 245 aa, synthetic construct
EIQLLESGGGLVQPGGSLRLSCAVSGFSITTTGYHWNWVRQAPGKGLEWVGYIYSSGSTSYNPSLKSRFTISRDTSKNTFYLQMNSLRAEDTAVYYCARGDWHYFDYWGQGTMVTVSSGGGGSGGGGSGGGGSGGGGSSSETTQPPSVSVSPGQTASITCSGEKLSDKYVHWYQQKPGQSPVMVIYENDRRPSGIPERFSGSNSGNTATLTISGTQAMDEADYFCQFWDSTNSAVFGGGTQLTVL

SEQ ID NO: 7311 - protein, 246 aa, synthetic construct
EIQLLESGGGLVQPGGSLRLSCAVSGFSITTTGYHWNWVRQAPGKGLEWVGYIYSSGSTSYNPSLKSRFTISRDTSKNTFYLQMNSLRAEDTAVYYCARGDWHYFDYWGQGTMVTVSSGGGGSGGGGSGGGGSGGGGSDSVTTQSPLSLPVTLGQPASISCSGEKLSDKYVHWYQQRPGQSPRMLIYENDRRPSGVPDRFSGSNSGNDATLKISRVEAEDVGVYFCQFWDSTNSAVFGGGTKVEIK

SEQ ID NO: 7312 - protein, 32 aa, synthetic construct
QIQLQESGPGLVKPSQSLSLSCSVTGFSINTG

SEQ ID NO: 7313 - protein, 5 aa, synthetic construct
GYHWN

SEQ ID NO: 7314 - protein, 14 aa, synthetic construct
WIRQFPGKKVEWMG

SEQ ID NO: 7315 - protein, 8 aa, synthetic construct
GDWHYFDY

SEQ ID NO: 7316 - protein, 11 aa, synthetic construct
WGQGTMVAVSS

SEQ ID NO: 7317 - protein, 32 aa, synthetic construct
QIQLQESGPGLVKPSQSLSLTCSVTGFSINTG

SEQ ID NO: 7318 - protein, 16 aa, synthetic construct
YIYSSGSTRYNPSLKS

SEQ ID NO: 7319 - protein, 32 aa, synthetic construct
RFSITRDTSKNQFFLQLNSVTTEDTATYYCTR

SEQ ID NO: 7320 - protein, 22 aa, synthetic construct
SYTLTQPPLVSVALGQKATIIC

SEQ ID NO: 7321 - protein, 10 aa, synthetic construct
HCWDSTNSAV

SEQ ID NO: 7322 - protein, 32 aa, synthetic construct
QIQLQESGPGLVKPSQSLSLSCSVTGFSITTT

SEQ ID NO: 7323 - protein, 32 aa, synthetic construct
RFSITRDTSKNQFFLQLNSVTTEDTATYYCAR

SEQ ID NO: 7324 - protein, 11 aa, synthetic construct
WGPGTMVTVSS

SEQ ID NO: 7325 - protein, 22 aa, synthetic construct
SFTLTQPPLVSVAVGQVATITC

SEQ ID NO: 7326 - protein, 11 aa, synthetic construct
SGEKLSDKYVH

SEQ ID NO: 7327 - protein, 7 aa, synthetic construct
ENDRRPS

SEQ ID NO: 7328 - protein, 32 aa, synthetic construct
GIPDQFSGSNSGNIASLTISKAQAGDEADYFC

SEQ ID NO: 7329 - protein, 10 aa, synthetic construct
QFWDSTNSAV

SEQ ID NO: 7330 - protein, 32 aa, synthetic construct
QIQLQESGPGLVKPSQTLSLTCTVSGFSITTT

SEQ ID NO: 7331 - protein, 32 aa, synthetic construct
QIQLVESGGGLVKPGGSLRLSCAVSGFSITTT

SEQ ID NO: 7332 - protein, 32 aa, synthetic construct
EIQLLESGGGLVQPGGSLRLSCAVSGFSITTT

SEQ ID NO: 7333 - protein, 32 aa, synthetic construct
EIQLVESGGGLVQPGGSLRLSCAVSGFSITTT

SEQ ID NO: 7334 - protein, 32 aa, synthetic construct
QIQLVQSGAEVKKPGASVKVSCKVSGFSITTT

SEQ ID NO: 7335 - protein, 22 aa, synthetic construct
SSETTQPPSVSVSPGQTASITC

SEQ ID NO: 7336 - protein, 32 aa, synthetic construct
GIPERFSGSNSGNTATLTISGTQAMDEADYFC

SEQ ID NO: 7337 - protein, 32 aa, synthetic construct
GIPERFSGSNPGNTATLTISRIEAGDEADYFC

SEQ ID NO: 7338 - protein, 32 aa, synthetic construct
GVPDRFSGSNSGNSASLAISGLRSEDEADYFC

SEQ ID NO: 7339 - protein, 32 aa, synthetic construct
GVPDRFSGSNSGNSASLAITGLQAEDEADYFC

SEQ ID NO: 7340 - protein, 23 aa, synthetic construct
DSVTTQSPLSLPVTLGQPASISC

SEQ ID NO: 7341 - protein, 15 aa, synthetic construct
WYQQRPGQSPRMLIY

SEQ ID NO: 7342 - protein, 32 aa, synthetic construct
GVPDRFSGSNSGNDATLKISRVEAEDVGVYFC

SEQ ID NO: 7343-7370 - skipped (28 entries)

SEQ ID NO: 7371 - protein, 32 aa, synthetic construct
QIQLQESGPGLVKPSETLSLTCTVSGFSINTG

SEQ ID NO: 7372 - protein, 32 aa, synthetic construct
QIQLQESGPGLVKPSQTLSLTCTVSGFSINTG

SEQ ID NO: 7373 - protein, 32 aa, synthetic construct
EIQLLESGGGLVQPGGSLRLSCAVSGFSINTG

SEQ ID NO: 7374 - protein, 32 aa, synthetic construct
QIQLVQSGAEVKKPGSSVKVSCKVSGFSINTG

SEQ ID NO: 7375 - protein, 32 aa, synthetic construct
EIQLVESGGGLVQPGGSLRLSCAVSGFSINTG

SEQ ID NO: 7376 - protein, 32 aa, synthetic construct
QIQLVQSGAEVKKPGASVKVSCKVSGFSINTG

SEQ ID NO: 7377 - protein, 32 aa, synthetic construct
QIQLVESGGGLVKPGGSLRLSCAVSGFSINTG

SEQ ID NO: 7378 - protein, 32 aa, synthetic construct
EIQLVQSGAEVKKPGATVKISCKVSGFSINTG

SEQ ID NO: 7379-7384 - skipped (6 entries)

SEQ ID NO: 7385 - protein, 16 aa, synthetic construct
YIYSSGTTKYNPSLKS

SEQ ID NO: 7386-7499 - skipped (114 entries)

SEQ ID NO: 7500 - protein, 5 aa, synthetic construct
NYWIE

SEQ ID NO: 7501 - protein, 17 aa, synthetic construct
EILPGAGPTNYNEKFKG

SEQ ID NO: 7502 - protein, 10 aa, synthetic construct
TDYDYDWFAY

SEQ ID NO: 7503 - protein, 7 aa, synthetic construct
GYTFSNY

SEQ ID NO: 7504 - protein, 6 aa, synthetic construct
LPGAGP

SEQ ID NO: 7505 - protein, 10 aa, synthetic construct
GYTFSNYWIE

SEQ ID NO: 7506 - protein, 17 aa, synthetic construct
KSSQSLLYSGNQKNYLA

SEQ ID NO: 7507 - protein, 7 aa, synthetic construct
WASTRES

SEQ ID NO: 7508 - protein, 9 aa, synthetic construct
QQYYGYPRT

SEQ ID NO: 7509 - protein, 119 aa, synthetic construct
QVQLQQSGTELMKPGASVKISCKASGYTFSNYWIEWIKQRPGHGLEWVGEILPGAGPTNYNEKFKGKATFTADSSSNTAYMQLSSLTSEDSAVYYCARTDYDYDWFAYWGQGTLVTVSA

SEQ ID NO: 7510 - skipped

SEQ ID NO: 7511 - protein, 449 aa, synthetic construct
QVQLQQSGTELMKPGASVKISCKASGYTFSNYWIEWIKQRPGHGLEWVGEILPGAGPTNYNEKFKGKATFTADSSSNTAYMQLSSLTSEDSAVYYCARTDYDYDWFAYWGQGTLVTVSAAKTTAPSVYPLAPVCGDTTGSSVTLGCLVKGYFPEPVTLTWNSGSLSSGVHTFPAVLQSDLYTLSSSVTVTSSTWPSQSITCNVAHPASSTKVDKKIEPRGPTIKPCPPCKCPAPNLLGGPSVFIFPPKIKDVLMISLSPIVTCVVVDVSEDDPDVQISWFVNNVEVHTAQTQTHREDYNSTLRVVSALPIQHQDWMSGKEFKCKVNNKDLPAPIERTISKPKGSVRAPQVYVLPPPEEEMTKKQVTLTCMVTDFMPEDIYVEWTNNGKTELNYKNTEPVLDSDGSYFMYSKLRVEKKNWVERNSYSCSVVHEGLHNHHTTKSFSRTPGK

SEQ ID NO: 7512 - protein, 224 aa, synthetic construct
DIVMSQSPSSLAVSVGEKVTMSCKSSQSLLYSGNQKNYLAWYQQKPGQSPKLLIYWASTRESGVPDRFTGSGSGTDFTLTINSVKAEDLTVYYCQQYYGYPRTFGGGTKVEIKRADAAPTVSIFPPSSEQLTSGGASVVCFLNNFYPKDINVKWKIDGSERQNGVLNSWTDQDSKDSTYSMSSTLTLTKDEYERHNSYTCEATHKTSTSPIVKSFNRNECEPEA

SEQ ID NO: 7513 - protein, 107 aa, synthetic construct; identical to SEQ ID NO: 87

SEQ ID NO: 7514 - protein, 10 aa, synthetic construct
FGGGTKVEIK

SEQ ID NO: 7515 - protein, 370 aa, synthetic construct
APASSSTKKTQLQLEHLLLDLQMILNGINNYKNPKLTRMLTAKFAMPKKATELKHLQCLEEELKPLEEVLNGAQSKNFHLRPRDLISNINVIVLELKGSETTFMCEYADETATIVEFLNRWITFAQSIISTLTGGGGSGGGGSDKTHTCPPCPAPELLGGPSVFLFPPKPKDTLMISRTPEVTCVVVDVSHEDPEVKFNWYVDGVEVHNAKTKPREEQYASTYRVVSVLTVLHQDWLNGKEYKCKVSNKALPAPIEKTISKAKGQPREPQVYTLPPCREEMTKNQVSLWCLVKGFYPSDIAVEWESNGQPENNYKTTPPVLDSDGSFFLYSKLTVDKSRWQQGNVFSCSVMHEALHNHYTQKSLSLSPGK

SEQ ID NO: 7516 - protein, 368 aa, synthetic construct; identical to SEQ ID NO: 4002

SEQ ID NO: 7517 - protein, 98 aa, Homo sapiens
AVVSQHPSRVIVKSGTSVKIECRSLDFQATTMFWYRQFPKQSLMLMATSNEGSKATYEQGVEKDKFLINHASLTLSTLTVTSAHPEDSGFYICSALAG
